United States Patent Application Publication US 2025/0320452 A1 - sequence listing, part 5

SEQ ID NO: 5 - DNA, 3977413 bp, synthetic construct (residues 1-1,988,707 of 3,977,413)
  source 1..3977413: mol_type = other DNA; note = Synthetic E.coli genome
agcttttcattctgactgcaacgggcaatatgtctctgtgtggattaaaaaaagagtgtctgatagcagcttctgaactggttacctgccgtgagtaaattaaaattttattgacttaggtcactaaatactttaaccaatataggcatagcgcacagacagataaaaattacagagtacacaacatccatgaaacgcattagcaccaccattaccaccaccatcaccattaccacaggtaacggtgcgggctgacgcgtacaggaaacacagaaaaaagcccgcacctgacagtgcgggctttttttttcgaccaaaggtaacgaggtaacaaccatgcgagtgttgaagttcggcggtacaagtgtggcaaatgcagaacgttttctgcgtgttgccgatattctggaaagcaatgccaggcaggggcaggtggccaccgtcctctctgcccccgccaaaatcaccaaccacctggtggcgatgattgaaaaaaccattagcggccaggatgctttacccaatatcagcgatgccgaacgtatttttgccgaacttttgacgggactcgccgccgcccagccggggttcccgctggcgcaattgaaaactttcgtcgatcaggaatttgcccaaataaaacatgtcctgcatggcattagtttgttggggcagtgcccggatagcatcaacgctgcgctgatttgccgtggcgagaaaatgagcatcgccattatggccggcgtattagaagcgcgcggtcacaacgttactgttatcgatccggtcgaaaaactgctggcagtggggcattacctcgaatctaccgtcgatattgctgagtccacccgccgtattgcggcaagccgcattccggctgatcacatggtgctgatggcaggtttcaccgccggtaatgaaaaaggcgaactggtggtgcttggacgcaacggttccgactactctgctgcggtgctggctgcctgtttacgcgccgattgttgcgagatttggacggacgttgacggggtctatacctgcgacccgcgtcaggtgcccgatgcgaggttgttgaagagcatgtcctaccaggaagcgatggagctttcctacttcggcgctaaagttcttcacccccgcaccattacccccatcgcccagttccagatcccttgcctgattaaaaataccggaaatcctcaagcaccaggtacgctcattggtgccagccgtgatgaagacgaattaccggtcaagggcatttccaatctgaataacatggcaatgttcagcgtttctggtccggggatgaaagggatggtcggcatggcggcgcgcgtctttgcagcgatgagtcgcgcccgtatttccgtggtgctgattacgcaaagttcttccgaatacagcatcagtttctgcgttccacaaagcgactgtgtgcgagctgaacgggcaatgcaggaagagttctacctggaactgaaagaaggcttactggagccgctggcagtgacggaacggctggccattatcagcgtggtaggtgatggtatgcgcaccttgcgtgggatcagcgcgaaattctttgccgcactggcccgcgccaatatcaacattgtcgccattgctcagggatcttctgaacgcagtatctctgtcgtggtaaataacgatgatgcgaccactggcgtgcgcgttactcatcagatgctgttcaataccgatcaggttatcgaagtgtttgtgattggcgtcggtggcgttggcggtgcgctgctggagcaactgaagcgtcagcaaagctggctgaagaataaacatatcgacttacgtgtctgcggtgttgccaacagcaaggctctgctcaccaatgtacatggccttaatctggaaaactggcaggaagaactggcgcaagccaaagagccgtttaatctcgggcgcttaattcgcctcgtgaaagaatatcatctgctgaacccggtcattgttgactgcacttccagccaggcagtggcggatcaatatgccgacttcctgcgcgaaggtttccacgttgtcacgccgaacaaaaaggccaacaccagcagcatggattactaccatcagttgcgttatgcggcggaaaaaagccggcgtaaattcctctatgacaccaacgttggggctggattaccggttattgagaacctgcaaaatctgctcaatgcaggtgatgaattgatgaagttctccggcattctttctggtagcctttcttatatcttcggcaagttagacgaaggcatgagtttctccgaggcgaccacgctggcgcgggaaatgggttataccgaaccggacccgcgagatgatctttctggtatggatgtggcgcgtaaactattgattctcgctcgtgaaacgggacgtgaactggagctggcggatattgaaattgaacctgtgctgcccgcagagtttaacgccgagggtgatgttgccgcttttatggcgaatctgagtcaactcgacgatctctttgccgcgcgcgtggcgaaggcccgtgatgaaggaaaagttttgcgctatgttggcaatattgatgaagatggcgtctgccgcgtgaagattgccgaagtggatggtaatgatccgctgttcaaagtgaaaaatggcgaaaacgccctggccttctatagccactattatcagccgctgccgttggtactgcgcggatatggtgcgggcaatgacgttacagctgccggtgtctttgctgatctgctacgtaccctcagttggaagttaggagtctgacatggttaaagtttatgccccggcttccagtgccaatatgagcgtcgggtttgatgtgctcggggcggcggtgacacctgttgatggtgcattgctcggagatgtagtcacggttgaggcggcagagacattcagtctcaacaacctcggacgctttgccgataagctgccgagtgaaccacgggaaaatatcgtttatcagtgctgggagcgtttttgccaggaactgggtaagcaaattccagtggcgatgaccctggaaaagaatatgccgatcggtagcggcttaggctccagtgcctgtagcgtggtcgcggcgctgatggcgatgaatgaacactgcggcaagccgcttaatgacactcgtttgctggctttgatgggcgagctggaaggccgtatctccggcagcattcattacgacaacgtggcaccgtgttttctcggtggtatgcagttgatgatcgaagaaaacgacatcatcagccagcaagtgccagggtttgatgagtggctgtgggtgctggcgtatccggggattaaagtcagcacggcagaagccagggctattttaccggcgcagtatcgccgccaggattgcattgcgcacgggcgacatctggcaggcttcattcacgcctgctattcccgtcagcctgagcttgccgcgaagctgatgaaagatgttatcgctgaaccctaccgtgaacggttactgccaggcttccggcaggcgcggcaggcggtcgcggaaatcggcgcggtagcgagcggtatctccggctccggcccgaccttgttcgctctgtgtgacaagccggaaaccgcccagcgcgttgccgactggttgggtaagaactacctgcaaaatcaggaaggttttgttcatatttgccggctggatacggcgggcgcacgagtactggaaaactaaatgaaactctacaatctgaaagatcacaacgagcaggtcagctttgcgcaagccgtaacccaggggttgggcaaaaatcaggggctgttttttccgcacgacctgccggaattcagcctgactgaaattgatgagatgctgaagctggattttgtcacccgcagtgcgaagatcctcagcgcgtttattggtgatgaaatcccacaggaaatcctggaagagcgcgtgcgcgcggcgtttgccttcccggctccggtcgccaatgttgaaagcgatgtcggttgtctggaattgttccacgggccaacgctggcatttaaagatttcggcggtcgctttatggcacaaatgctgacccatattgcgggtgataagccagtgaccattctgaccgcgacctccggtgataccggagcggcagtggctcatgctttctacggtttaccgaatgtgaaagtggttatcctctatccacgaggcaaaatcagtccactgcaagaaaaactgttctgtacattgggcggcaatatcgaaactgttgccatcgacggcgatttcgatgcctgtcaggcgctggtgaagcaggcgtttgatgatgaagaactgaaagtggcgctagggttaaacagcgctaacagcattaacatcagccgtttgctggcgcagatttgctactactttgaagctgttgcgcagctgccgcaggagacgcgcaaccagctggttgtcagcgtgccaagcggaaacttcggcgatttgacggcgggtctgctggcgaagagtctcggtctgccggtgaaacgttttattgctgcgaccaacgtgaacgataccgtgccacgtttcctgcacgacggtcagtggagtcccaaagcgactcaggcgacgttatccaacgcgatggacgtgagtcagccgaacaactggccgcgtgtggaagagttgttccgccgcaaaatctggcaactgaaagagctgggttatgcagccgtggatgatgaaaccacgcaacagacaatgcgtgagttaaaagaactgggctacactagcgagccgcacgctgccgtagcttatcgtgcgctgcgtgatcagttgaatccaggcgaatatggcttgttcctcggcaccgcgcatccggcgaaatttaaagagagcgtggaagcgattctcggtgaaacgttggatctgccaaaagagctggcagaacgtgctgatttacccttgcttagtcataatctgcccgccgattttgctgcgttgcgtaaattgatgatgaatcatcagtaaaatctattcattatctcaatcaggccgggtttgcttttatgcagcccggcttttttatgaagaaattatggagaaaaatgacagggaaaaaggagaaattctcaataaatgcggtaacttagagattaggattgcggagaataacaaccgccgttctcatcgagtaatctccggatatcgacccataacgggcaatgataaaaggagtaacctgtgaaaaagatgcaatctatcgtactcgcactttccctggttctggtcgctcccatggcagcacaggctgcggaaattacgttagtcccgagtgtaaaattacagataggcgatcgtgataatcgtggctattactgggatggaggtcactggcgcgaccacggctggtggaaacaacattatgaatggcgaggcaatcgctggcacctacacggaccgccgccaccgccgcgccaccataagaaagctcctcatgatcatcacggcggtcatggtccaggcaaacatcaccgctaaatgacaaatgccgggtaacaatccggcattcagcgcctgatgcgacgctggcgcgtcttatcaggcctacgttaattctgcaatatattgaatctgcatgcttttgtaggcaggataaggcgttcacgccgcatccggcattgactgcaaacttaacgctgctcgtagcgtttaaacaccagttcgccattgctggaggaatcttcatcaaagaagtaaccttcgctattaaaaccagtcagttgctctggtttggtcagccgattttcaataatgaaacgactcatcagaccgcgtgctttcttagcgtagaagctgatgatcttaaatttgccgttcttctcatcgaggaacaccggcttgataatctcggcattcaatttcttcggcttcacgcttttaaaatactcatcactcgccagattaatcaccacattatcgccttgtgctgcgagcgcctcgttcagcttgttggtgatgatatctccccagaattgatacagatctttccctcgggcattctcaagacggatccccatttccagacgataaggctgcattaaatcgagcgggcggagtacgccatacaagccggaaagcattcgcaaatgctgttgggcaaaatcgaaatcgtcttcgctgaaggtttcggcctgcaagccggtgtagacatcacctttaaacgccagaatcgcctggcgggcattcgccggcgtgaaatctggctgccagtcatgaaagcgagcggcgttgatacccgccagtttgtcgctgatgcgcatcagcgtgctaatctgcggaggcgtcagtttccgcgcctcatggatcaactgctgggaattgtctaacagctccggcagcgtatagcgcgtggtggtcaacgggctttggtaatcaagcgttttcgcaggactaataagaatcagcatatccagtccttgcaggaaatttatgccgactttagcaaaaaatgagaatgagttgatcgatagttgtgattactcctggctaacatcatcccacgcgtccggagaaagctggcgaccgatatccggataacgcaatggatcaaacaccgggcgcacgccgagtttacgctggcgtagataatcactggcaatggtatgaaccacagggctgagcagtaaaatggcggtcaaattggtaatagccatgcaggccattatgatatctgccagttgccacatcagcggaaggcttagcaaggtgccgccgatgaccgttgcgaaggtgcagatccgcaaacaccagatcgctttagggttgttcaggcgtaaaaagaagagattgttttcggcataaatgtagttggcaacgatggagctgaaggcaaacagaataaccacaagggtaacaaactcagcaccccaggaacccattagcacccgcatcgccttctggataagctgaataccttccagcggcatgtaggttgtgccgttacccgccagtaatatcagcatggcgcttgccgtacagatgaccagggtgtcgataaaaatgccaatcatctggacaatcccttgcgctgccggatgcggaggccaggacgccgctgccgctgccgcgtttggcgtgctacccattcccgcctcattggaaaacatactgcgctgaaaaccgttagtaatcgcctggcttaaggtatatcccgccgcgccgcctgccgcttcctgccagccaaaagcactctcaaaaatagaccaaatgacgtggggaagttgcccgatattcattacgcaaattaccaggctggtcagtacccagattatcgccatcaacgggacaaagccctgcatgagccgggcgacgccatgaagaccgcgagtgattgccagcagagtaaagacagcgagaataatgcctgtcaccagcgggggaaaatcaaaagaaaaactcagggcgcgggcaacggcgttcgcttgaactccgctgaaaattatgccataggcgatgagcaaaaagacggcgaacagaacgcccatccagcgcatccccagcccgcgcgccatataccatgccggtccgccacgaaactgcccattgacgtcacgttctttataaagttgtgccagagaacattcggcaaagctggtcgccatgccgataaacgcggcaacccacatccaaaagacggctccaggtccaccggcggtaatagccagcgcaacgccggccaggttgccgctacccacgcgcgccgcaagactggtacacaaactctgaaaactggttaaaccgcctggctgtggatgaatgctatttttaagacttttgccaaactggcggatgtagcgaaactgcacaaatccggtgcgaaaagtgaaccaacaacctgcgccgaagagcaggtaaatcattacgcttccccaaaggacgctgttaatgaaggagaaaaaatctggcatgcatatccctcttattgccggccgcgatgactttcctgtgtaaacgttaccaattgtttaagaagtatatacgctacgaggtacttgataacttctgcgtagcatacatgaggttttgtataaaaatggcgggcgatatcaacgcagtgtcagaaatccgaaacagtctcgcctggcgataaccgtcttgtcggcggttgcgctgacgttgcgtcgtgatatcatcagggcagaccggttacatccccctaacaagctgtttaaagagaaatactatcatgacggacaaattgacctcccttcgtcagtacaccaccgtagtggccgacactggggacatcgcggcaatgaagctgtatcaaccgcaggatgccacaaccaacccttctctcattcttaacgcagcgcagattccggaataccgtaagttgattgatgatgctgtcgcctgggcgaaacagcagagcaacgatcgcgcgcagcagatcgtggacgcgaccgacaaactggcagtaaatattggtctggaaatcctgaaactggttccgggccgtatcagtactgaagttgatgcgcgtctttcctatgacaccgaagcgagtattgcgaaagcaaaacgcctgatcaaactctacaacgatgctggtattagcaacgatcgtattctgatcaaactggcttctacctggcagggtatccgtgctgcagaacagctggaaaaagaaggcatcaactgtaacctgaccctgctgttctccttcgctcaggctcgtgcttgtgcggaagcgggcgtgttcctgatcagcccgtttgttggccgtattcttgactggtacaaagcgaataccgataagaaagagtacgctccggcagaagatccgggcgtggtttctgtatctgaaatctaccagtactacaaagagcacggttatgaaaccgtggttatgggcgcaagcttccgtaacatcggcgaaattctggaactggcaggctgcgaccgtctgaccatcgcaccggcactgctgaaagagctggcggagagcgaaggggctatcgaacgtaaactgtcttacaccggcgaagtgaaagcgcgtccggcgcgtatcactgagtccgagttcctgtggcagcacaaccaggatccaatggcagtagataaactggcggaaggtatccgtaagtttgctattgaccaggaaaaactggaaaaaatgatcggcgatctgctgtaatcattcttagcgtgaccgggaagtcggtcacgctacctcttctgaagcctgtctgtcactcccttcgcagtgtatcattctgtttaacgagactgtttaaacggaaaaatcttgatgaatactttacgtattggcttagtttccatctctgatcgcgcatccagcggcgtttatcaggataaaggcatccctgcgctggaagaatggctgacaagcgcgctaaccacgccgtttgaactggaaacccgcttaatccccgatgagcaggcgatcatcgagcaaacgttgtgtgagctggtggatgaaatgagttgccatctggtgctcaccacgggcggaactggcccggcgcgtcgtgacgtaacgcccgatgcgacgctggcagtagcggaccgcgagatgcctggctttggtgaacagatgcgccagatcagcctgcattttgtaccaactgcgatccttagccgtcaggtgggcgtgattcgcaaacaggcgctgatccttaacttacccggtcagccgaagtctattaaagagacgctggaaggtgtgaaggacgctgagggtaacgttgtggtacacggtatttttgccagcgtaccgtactgcattcagttgctggaagggccatacgttgaaacggcaccggaagtggttgcagcattcagaccgaagagtgcaagacgcgacgttagcgaataaaaaaatccccccgagcggggggatctcaaaacaattagtgggattcaccaatcggcagaacggtgcgaccaaactgctcgttcagtacttcacccatcgccagatagattgcgctggcaccgcagatcagcccaatccagccggcaaagtggatgattgcggcgttaccggcaatgttaccgatcgccagcagggcaaacagcacggtcaggctaaagaaaacgaattgcagaacgcgtgcgcctttcagcgtgccgaagaacataaacagcgtaaatacgccccacagacccaggtagacaccaaggaactgtgcatttggcgcatcggtcagacccagtttcggcatcagcagaatcgcaaccagcgtcagccagaaagaaccgtaagaggtgaatgcggttaaaccgaaagtgttgccttttttgtactccagcagaccagcaaaaatttgcgcgatgccgccgtagaaaatgcccatggcaagaataatgccgtccagagcgaaataacccacgttgtgcaggttaagcagaatggtggtcatgccgaagcccatcaggcccagcggtgccggattagccaacttagtgttgcccataattcctcaaaaatcatcatcgaatgaatggtgaaataatttccctgaataactgtagtgttttcagggcgcggcataataatcagccagtggggcagtgtctacgatcttttgaggggaaaatgaaaattttccccggtttccggtatcagacctgagtggcgctaaccatccggcgcaggcaggcgatttgcagtacggctggaatcgtcacgcgataggcgctgccgctgaccgctttaaccccatttagtgccgcacctacagggcctcccagccccgcgccgcgcagcaaaccatgcccaagtacgctcattgctgcgtgggtgcgtaaaatgcgggtcagttggctggaaagcaaatggctcacaccttttgccaataatttgtctttcatcagcagcggcagcagctcttccagctcattcaccctggcatcgaccgcgtgcagaaactcctgcttatgttcctcgtccattttcttccaggtattacgcagaaattgttccagtaactgttgctcaatttcaaacgtagacatctctttgtcggctttcagcttcaatcgcttactaacatcgagcaaaatggcccgatacaatttaccgtgtccgcgcagtttgttggcgatactatcgccaccaaaatgctgtaattctccggcaatcagctgccagttgcggcgatgttgctcgggatgcccttccatgcttttaaacagttcgttgcgcatcagtacgctggagaggcgagttttgcctttttcattatgggtgagcaatcgggcgaaatttgccaactgttcctcactacaatgctgaagaaaatccagatcactatcattcaggtaattaacattcattttttgtggcttctatattctggcgttagtcgtcgccgataattttcagcgtggccatatcgctactgttcaccgtatgaccgctaaaggtgattttactgacgcagcgtttattgtcgttatcgctgttaatgttgatccagtcagtggtttgcccttcttttatttcactaggaatattcaggctctgactggcgctacgggcggctttgaaataaacgcttgcaccgcttaactgtaaatcgccatggtcggcagagagttgtatgcgtttcacaatgcgacaaacaggaagtttcagcgccagatcgttggtttcgttacgcggcattgcaatggcgccgaggagtttatggtcgtttgcctgcgccgtgcagcacagcatcaggctaatcgccaggctggcggaaatcgtaaaaacggatttcataaggattctcttagtgggaagaggtagggggatgaatacccactagtttactgctgataaagagaagattcaggcacgtaatcttttctttttattacaattttttgatgaatgccttggctgcgattcattctttatatgaataaaattgctgtcaattttacgtcttgtcctgccatatcgcgaaatttctgcgcaaaagcacaaaaaatttttgcatctcccccttgatgacgtggtttacgaccccatttagtagtcaaccgcagtgagtgagtctgcaaaaaaatgaaattgggcagttgaaaccagacgtttcgcccctattacagactcacaaccacatgatgaccgaatatatagtggagacgtttagatgggtaaaataattggtatcgacctgggtactaccaactcttgtgtagcgattatggatggcaccactcctcgcgtgctggagaacgccgaaggcgatcgcaccacgccttctatcattgcctatacccaggatggtgaaactctagttggtcagccggctaaacgtcaggcagtgacgaacccgcaaaacactctgtttgcgattaaacgcctgattggtcgccgcttccaggacgaagaagtacagcgtgatgtttccatcatgccgttcaaaattattgctgctgataacggcgacgcatgggtcgaagttaaaggccagaaaatggcaccgccgcagatttctgctgaagtgctgaaaaaaatgaagaaaaccgctgaagattacctgggtgaaccggtaactgaagctgttatcaccgtaccggcatactttaacgatgctcagcgtcaggcaaccaaagacgcaggccgtatcgctggtctggaagtaaaacgtatcatcaacgaaccgaccgcagctgcgctggcttacggtctggacaaaggcactggcaaccgtactatcgcggtttatgacctgggtggtggtactttcgatatttctattatcgaaatcgacgaagttgacggcgaaaaaaccttcgaagttctggcaaccaacggtgatacccacctggggggtgaagacttcgacagccgtctgatcaactatctggttgaagaattcaagaaagatcagggcattgacctgcgcaacgatccgctggcaatgcagcgcctgaaagaagcggcagaaaaagcgaaaatcgaactgtcttccgctcagcagaccgacgttaacctgccatacatcactgcagacgcgaccggtccgaaacacatgaacatcaaagtgactcgtgcgaaactggaaagcctggttgaagatctggtaaaccgttccattgagccgctgaaagttgcactgcaggacgctggcctgtccgtatctgatatcgacgacgttatcctcgttggtggtcagactcgtatgccaatggttcagaagaaagttgctgagttctttggtaaagagccgcgtaaagacgttaacccggacgaagctgtagcaatcggtgctgctgttcagggtggtgttctgactggtgacgtaaaagacgtactgctgctggacgttaccccgctgtctctgggtatcgaaaccatgggcggtgtgatgacgacgctgatcgcgaaaaacaccactatcccgaccaagcacagccaggtgttctctaccgctgaagacaaccagtctgcggtaaccatccatgtgctgcagggtgaacgtaaacgtgcggctgataacaaatctctgggtcagttcaacctagatggtatcaacccggcaccgcgcggcatgccgcagatcgaagttaccttcgatatcgatgctgacggtatcctgcacgtttccgcgaaagataaaaacagcggtaaagagcagaagatcaccatcaaggcttcttctggtctgaacgaagatgaaatccagaaaatggtacgcgacgcagaagctaacgccgaagctgaccgtaagtttgaagagctggtacagactcgcaaccagggcgaccatctgctgcacagcacccgtaagcaggttgaagaagcaggcgacaaactgccggctgacgacaaaactgctatcgagtctgcgctgactgcactggaaactgctctgaaaggtgaagacaaagccgctatcgaagcgaaaatgcaggaactggcacaggtttcccagaaactgatggaaatcgcccagcagcaacatgcccagcagcagactgccggtgctgatgcttctgcaaacaacgcgaaagatgacgatgttgtcgacgctgaatttgaagaagtcaaagacaaaaaataatcgccctataaacgggtaattatactgacacgggcgaaggggaatttcctctccgcccgtgcattcatctaggggcaatttaaaaaagatggctaagcaagattattacgagattttaggcgtttccaaaacagcggaagagcgtgaaatcagaaaggcctacaaacgcctggccatgaaataccacccggaccgtaaccagggtgacaaagaggccgaggcgaaatttaaagagatcaaggaagcttatgaagttctgaccgacagccaaaaacgtgcggcatacgatcagtatggtcatgctgcgtttgagcaaggtggcatgggcggcggcggttttggcggcggcgcagacttcagcgatatttttggtgacgttttcggcgatatttttggcggcggacgtggtcgtcaacgtgcggcgcgcggtgctgatttacgctataacatggagctcaccctcgaagaagctgtacgtggcgtgaccaaagagatccgcattccgactctggaagagtgtgacgtttgccacggtagcggtgcaaaaccaggtacacagccgcagacttgtccgacctgtcatggttctggtcaggtgcagatgcgccagggattcttcgctgtacagcagacctgtccacactgtcagggccgcggtacgctgatcaaagatccgtgcaacaaatgtcatggtcatggtcgtgttgagcgcagcaaaacgctgtccgttaaaatcccggcaggggtggacactggagaccgcatccgtcttgcgggcgaaggtgaagcgggcgagcatggcgcaccggcaggcgatctgtacgttcaggttcaggttaaacagcacccgattttcgagcgtgaaggcaacaacctgtattgcgaagtcccgatcaacttcgctatggcggcgctgggtggcgaaatcgaagtaccgacccttgatggtcgcgtcaaactgaaagtgcctggcgaaacccagaccggtaagctattccgtatgcgcggtaaaggcgtcaagtctgtccgcggtggcgcacagggtgatttgctgtgccgcgttgtcgtcgaaacaccggtaggcctgaacgaaaggcagaaacagctgctgcaagagctgcaagaaagcttcggtggcccaaccggcgagcacaacagcccgcgcagtaagagcttctttgatggtgtgaagaagttttttgacgacctgacccgctaacctccccaaaagcctgcccgtgggcaggcctgggtaaaaatagggtgcgttgaagatatgcgagcacctgtaaagtggcggggatcactctacctcaatgtgtatcacaatatccatattctttgtgggggagtctggagattgagtagatattcttgttcagaatgtatcagccgatggttctacgattcttaagccacgaagagttcagatagtacaacggcatgtctcttttgactatctggcaaccggcagtgtgttctctcacgcatcacaaaagcagcaggcataaaaaaacccgcttgcgcgggctttttcacaaagcttcagcaaattggcgattaagccagtttgttgatctgtgcagtcaggttagccttatgacgtgcagctttgtttttgtggatcagacctttagcagcctgacggtccacgatcggttgcatttcgttaaatgctttctgtgcagcagctttgtcgccagcttcgatagctgcgtatactttcttgatgaaagtacgcatcatagagcgacggcttgcgttgtgcttacgagccttttcagactgaatggcgcgcttcttagcacttttgatattagccaaggtccaactcccaaatgtgttctatatggacaattcaaaggccgaggaatatgcccttttagccttcttttgtcaatggatttgtgcaaataagcgccgttaatgtgccggcacagcttacgtagtgatggcgcaggattctaccagcttgcggggtgtgaatacagcttttccgcgataaaaattgcagcaggcggtcagtttcttcccgtgatttgcgccatggcaatgaaaagccacttctttctgattagcgtactcaatcgccggttaaccttgaccgctgtacaaggtatactcggacgatttagcctgttttgagccagacatgaagctgatacgcggcatacataatctcagccaggccccgcaagaagggtgtgtgctgactattggtaatttcgacggcgtgcatcgcggtcatcgcgcgctgttacagggcttgcaggaagaagggcgcaagcgcaacttaccggtgatggtgatgctttttgaacctcaaccactggaactgtttgctaccgataaagccccggcaagactgacccggctgcgggaaaaactgcgttaccttgcagagtgtggcgttgattacgtgctgtgcgtgcgtttcgacaggcgtttcgcggcgttaaccgcgcaaaatttcatcagcgatcttctggtgaagcatttgcgcgtaaaatttcttgccgtaggtgatgatttccgctttggcgctggtcgtgaaggcgatttcttgttattacagaaagctggcatggaatacggcttcgatatcaccagtacgcaaactttttgcgaaggtggcgtgcgcatcagcagcaccgccgtgcgtcaggcccttgcggatgacaatctggctctggcagagagtttactggggcacccgtttgccatctccgggcgtgtagtccacggtgatgaattagggcgcactataggtttcccgacggcgaatgtaccgctgcgccgtcaggtttccccggtgaaaggggtttatgcggtagaagtgctgggcctcggtgaaaagccgttacccggcgtggcaaacatcggaacacgcccaacggttgccggtattcgccagcagctggaagtgcatttgttagatgttgcaatggacctttacggtcgccatatacaagtagtgctgcgtaaaaaaatacgcaatgagcagcgatttgcgagcctggacgaactgaaagcgcagattgcgcgtgatgaattaaccgcccgcgaattttttgggctaacaaaaccggcttaagcctgttatgtaatcaaaccgaaatacggaaccgagaatctgatgagtgactataaaagtaccctgaatttgccggaaacagggttcccgatgcgtggcgatctcgccaagcgcgaacccggaatgctggcgcgttggactgatgatgatctgtacggcatcatccgtgcggctaaaaaaggcaaaaaaaccttcattctgcatgatggccctccttatgcgaatggcagcattcatattggtcacagcgttaacaagattctgaaagacattatcgtgaagtccaaagggctttccggttatgacagcccgtatgtgcctggctgggactgccacggtctgccgatcgagctgaaagtcgagcaagaatacggtaagccgggtgagaaattcaccgccgccgagttccgcgccaagtgccgcgaatacgcggcgacccaggttgacggtcaacgcaaagactttatccgtctgggcgtgctgggcgactggagccacccgtacctgaccatggacttcaaaactgaagccaacatcatccgcgcgctgggcaaaatcatcggcaacggtcacctgcacaaaggcgcgaagccagttcactggtgcgttgactgccgttctgcgctggcggaagcggaagttgagtattacgacaaaacttctccgtccatcgacgttgctttccaggcagtcgatcaggatgcactgaaagcaaaatttgccgtaagcaacgttaacggcccaatcagcctggtaatctggaccaccacgccgtggactctgcctgccaaccgcgcaatctctattgcaccagatttcgactatgcgctggtgcagatcgacggtcaggccgtgattctggcgaaagatctggttgaaagcgtaatgcagcgtatcggcgtgaccgattacaccattctcggcacggtaaaaggtgcggagcttgagctgctgcgctttacccatccgtttatgggcttcgacgttccggcaatcctcggcgatcacgttaccctggatgccggtaccggtgccgttcacaccgcgcctggccacggcccggacgactatgtgatcggtcagaaatacggcctggaaaccgctaacccggttggcccggacggcacttatctgccgggcacttatccgacgctggatggcgtgaacgtcttcaaagcgaacgacatcgtcgttgcgctgctgcaggaaaaaggcgcgctgctgcacgttgagaaaatgcagcacagctatccgtgctgctggcgtcacaaaacgccgatcatcttccgcgcgacgccgcagtggttcgtcagcatggatcagaaaggtctgcgtgcgcagagtctgaaagagatcaaaggcgtgcagtggatcccggactggggccaggcgcgtatcgagagcatggttgctaaccgtcctgactggtgtatctcccgtcagcgcacctggggtgtaccgatgagtctgttcgtgcacaaagacacggaagagctgcatccgcgtacccttgaactgatggaagaagtggcaaaacgcgttgaagtcgatggcatccaggcgtggtgggatctcgatgcgaaagagatcctcggcgacgaagctgatcagtacgtgaaagtgccggacacattggatgtatggtttgactccggatctacccactcttctgttgttgacgtgcgtccggaatttgccggtcacgcagcggacatgtatctggaaggttctgaccaacaccgcggctggttcatgtcttccctaatgatctccaccgcgatgaagggtaaagcgccgtatcgtcaggtactgacccacggctttaccgtggatggtcagggccgcaagatgtctaaatccatcggcaataccgttagcccgcaggatgtgatgaacaaactgggcgcggatattctgcgtctgtgggtggcaagtaccgactacaccggtgaaatggccgtttctgacgagatcctgaaacgtgctgccgatagctatcgtcgtatccgtaacaccgcgcgcttcctgctggcaaacctgaacggttttgatccagcaaaagatatggtgaaaccggaagagatggtggtactggatcgctgggccgtaggttgtgcgaaagcggcacaggaagacatcctcaaggcgtacgaagcatacgatttccacgaagtggtacagcgtctgatgcgcttctgctccgttgagatgggttccttctacctcgacatcatcaaagaccgtcagtacaccgccaaagcggacagtgtggcgcgtcgtagctgccagactgcgctatatcacatcgcagaagcgctggtgcgctggatggcaccaatcctctccttcaccgctgatgaagtgtggggctacctgccgggcgaacgtgaaaaatacgtcttcaccggtgagtggtacgaaggcctgtttggcctggcagacagtgaagcgatgaacgatgcgttctgggacgagctgttgaaagtgcgtggcgaagtgaacaaagtcattgagcaagcgcgtgccgacaagaaagtgggtggcagcctggaagcggcagtaaccttgtatgcagaaccggaactgagcgcgaaactgaccgcgctgggcgatgaattacgatttgtcctgttgacctccggcgctaccgttgcagactataacgacgcacctgctgatgctcagcagagcgaagtactcaaagggctgaaagtcgcgttgagtaaagccgaaggtgagaagtgcccacgctgctggcactacacccaggatgtcggcaaggtggcggaacacgcagaaatctgcggccgctgtgtcagcaacgtcgccggtgacggtgaaaaacgtaagtttgcctgatgagtcaaagcatctgtagtacagggctacgctggctgtggctggtggtagtcgtgctgattatcgatctgggcagcaaatacctgatcctccagaactttgctctgggggatacggtcccgctgttcccgagccttaatctgcattatgcgcgtaactatggcgcggcgtttagtttccttgccgatagcggcggctggcagcgttggttctttgccggtattgcgattggtattagcgtgatcctggcagtgatgatgtatcgcagcaaggccacgcagaagctaaacaatatcgcttacgcgctgattattggcggcgcgctgggcaacctgttcgaccgcctgtggcacggcttcgttgtcgatatgatcgacttctacgtcggcgactggcacttcgccaccttcaaccttgccgatactgccatctgtgtcggtgcggcactgattgtgctggaaggttttttgccttctagagcgaaaaaacaataataaaccctgccggatgcgatgctgacgcatcttatccggcctacagattgctgcgaaatcgtaggccggataaggcgtttacgccgcatccggcaaaaatccttaaatataagagcaaacctgcatgtctgaatctgtacagagcaatagcgccgtcctggtgcacttcacgctaaaactcgacgatggcaccaccgccgagtctacccgcaacaacggtaaaccggcgctgttccgcctgggtgatgcttctctttctgaagggctggagcaacacctgttggggctgaaagtgggcgataaaaccaccttcagcttggagccagatgcggcgtttggcgtgccgagtccggacctgattcagtacttctcccgccgtgaatttatggatgcaggcgagccagaaattggcgcaatcatgctttttaccgcaatggatggcagtgagatgcctggcgtgatccgcgaaattaacggcgactccattaccgttgatttcaaccatccgctggccgggcagaccgttcattttgatattgaagtgctggaaatcgatccggcactggaggcgtaacatgcagatcctgttggccaacccgcgtggtttttgtgccggggtagaccgcgctatcagcattgttgaaaacgcgctggccatttacggcgcaccgatatatgtccgtcacgaagtggtacataaccgctatgtggtcgatagcttgcgtgagcgtggggctatctttattgagcagattagcgaagtaccggacggcgcgatcctgattttctccgcacacggtgtttctcaggcggtacgtaacgaagcaaaaagtcgcgatttgacggtgtttgatgccacctgtccgctggtgaccaaagtgcatatggaagtcgcccgcgccagtcgccgtggcgaagaatctattctcatcggtcacgccgggcacccggaagtggaagggacaatgggccagtacagtaacccggaagggggaatgtatctggtcgaaagcccggacgatgtgtggaaactgacggtcaaaaacgaagagaagctctcctttatgacccagaccacgctgagcgtggatgacacgtctgatgtgatcgacgcgctgcgtaaacgcttcccgaaaattgtcggtccgcgcaaagatgacatctgctacgccacgactaaccgtcaggaagcggtacgcgccctggcagaacaggcggaagttgtgttggtggtcggtagcaaaaactcctccaactccaaccgtctggcggagctggcccagcgtatgggcaaacgcgcgtttttgattgacgatgcgaaagacatccaggaagagtgggtgaaagaggttaaatgcgtcggcgtgactgcgggcgcaagcgctccggatattctggtgcagaatgtggtggcgcgtttgcagcagctgggcggtggtgaagccattccgctggaaggccgtgaagaaaacattgttttcgaagtgccgaaagagctgcgtgtcgatattcgtgaagtcgattaagtcattagcagcctaagttatgcgaaaatgccggtcttgttaccggcattttttatggagaaaacatgcgtttacctatcttcctcgatactgaccccggcattgacgatgccgtcgccattgccgccgcgatttttgcacccgaactcgacctgcaactgatgaccaccgtcgcgggtaatgtcagcgttgagaaaactacccgcaatgccctgcaactgctgcatttctggaatgcggagattccgctcgcccaaggggccgctgtgccactggtacgcgcaccgcgtgatgcggcatctgtgcacggcgaaagcggaatggctggctacgactttgttgagcacaaccgaaagccgctcgggataccggcgtttctggcgattcgggatgccctgatgcgtgcaccagagcctgttaccctggtggccatcggcccgttaaccaatattgcgctgttacttagtcaatgcccggaatgcaagccgtatattcgccgtctggtgatcatgggtggttctgccggacgcggcaactgtacgccaaacgccgagtttaatattgctgccgatccagaagctgctgcctgtgtcttccgcagtggtattgaaatcgtcatgtgcggtttggatgtcaccaatcaggcaatattaactcctgactatctctctacactgccgcagttaaaccgtaccgggaaaatgcttcacgccctgtttagccactaccgtagcggcagtatgcaaagcggcttgcgaatgcacgatctctgcgccatcgcctggctggtgcgcccggacctgttcactctcaaaccctgttttgtggcagtggaaactcagggcgaatttaccagtggcacgacggtggttgatatcgacggttgcctgggcaagccagccaatgtacaggtggcattggatctggatgtgaaaggcttccagcagtgggtggctgaggtgctggctctggcgagctaacctgtcacatgttattggcatgcagtcattcatcgactcatgcctttcactgatatccctccctgtttatcattaatttctaattatcagcgtttttggctggcggcgtagcgatgcgctggttactctgaaaacggtctatgcaaattaacaaaagagaatagctatgcatgatgcaaacatccgcgttgccatcgcgggagccggggggcgtatgggccgccagttgattcaggcggcgctggcattagagggcgtgcagttgggcgctgcgctggagcgtgaaggatcttctttactgggcagcgacgccggtgagctggccggagccgggaaaacaggcgttaccgtgcaaagcagcctcgatgcggtaaaagatgattttgatgtgtttatcgattttacccgtccggaaggtacgctgaaccatctcgctttttgtcgccagcatggcaaagggatggtgatcggcactacggggtttgacgaagccggtaaacaagcaattcgtgacgccgctgccgatattgcgattgtctttgctgccaattttagcgttggcgttaacgtcatgcttaagctgctggagaaagcagccaaagtgatgggtgactacaccgatatcgaaattattgaagcacatcatagacataaagttgatgcgccgagtggcaccgcactggcaatgggagaggcgatcgcccacgcccttgataaagatctgaaagattgcgcggtctacagtcgtgaaggccacaccggtgaacgtgtgcctggcaccattggttttgccaccgtgcgtgcaggtgacatcgttggtgaacataccgcgatgtttgccgatattggcgagcgtctggagatcacccataaggcgtccagccgtatgacatttgctaacggcgcggtaagaagcgctttgtggttgagtggtaaggaaagcggtctttttgatatgcgagatgtacttgatctcaataatttgtaaccacaaaatatttgttatggtgcaaaaataacacatttaatttattgattataaagggctttaatttttggcccttttatttttggtgttatgtttttaaattgtctataagtgccaaaaattacatgttttgtcttctgtttttgttgttttaatgtaaattttgaccatttggtccacttttttctgctcgtttttatttcatgcaatcttcttgctgcgcaagcgttttccagaacaggttagatgatctttttgtcgcttaatgcctgtaaaacatgcatgagccacaaaataatataaaaaatcccgccattaagttgacttttagcgcccatatctccagaatgccgccgtttgccagaaattcgtcggtaagcagatttgcattgatttacgtcatcattgtgaattaatatgcaaataaagtgagtgaatattctctggagggtgttttgattaagagtgcgctattggttctggaagacggaacccagtttcacggtcgggccataggggcaacaggtagcgcggttggggaagtcgttttcaatactagtatgaccggttatcaagaaatcctcactgatccttcctattctcgtcaaatcgttactcttacttatccccatattggcaatgtcggcaccaatgacgccgatgaagaatcttctcaggtacatgcacaaggtctggtgattcgcgacctgccgctgattgccagcaacttccgtaataccgaagacctctcttcttacctgaaacgccataacatcgtggcgattgccgatatcgatacccgtaagctgacgcgtttactgcgcgagaaaggcgcacagaatggctgcattatcgcgggcgataacccggatgcggcgctggcgttagaaaaagcccgcgcgttcccaggtctgaatggcatggatctggcaaaagaagtgaccaccgcagaagcctatagctggacacaagggagctggacgttgaccggtggcctgccagaagcgaaaaaagaagacgagctgccgttccacgtcgtggcttatgattttggtgccaagcgcaacatcctgcggatgctggtggatagaggctgtcgcctgaccatcgttccggcgcaaacttctgcggaagatgtgctgaaaatgaatccagacggcatcttcctctccaacggtcctggcgacccggccccgtgcgattacgccattaccgccatccagaaattcctcgaaaccgatattccggtattcggcatctgtctcggtcatcagctgctggcgctggcgagcggtgcgaagactgtcaaaatgaaatttggtcaccacggcggcaaccatccggttaaagatgtggagaaaaacgtggtaatgatcaccgcccagaaccacggttttgcggtggacgaagcaacattacctgcaaacctgcgtgtcacgcataaatccctgttcgacggtacgttacagggcattcatcgcaccgataaaccggcattcagcttccaggggcaccctgaagccagccctggtccacacgacgccgcgccgttgttcgaccactttatcgagttaattgagcagtaccgtaaaaccgctaagtaatcaggagtaaaagagccatgccaaaacgtacagatataaaaagtatcctgattctgggtgcgggcccgattgttatcggtcaggcgtgtgagtttgactactctggcgcgcaagcgtgtaaagccctgcgtgaagagggttaccgcgtcattctggtgaactccaacccggcgaccatcatgaccgacccggaaatggctgatgcaacctacatcgagccgattcactgggaagttgtacgcaagattattgaaaaagagcgcccggacgcggtgctgccaacgatgggcggtcagacggcgctgaactgcgcgctggagctggaacgtcagggcgtgttggaagagttcggtgtcaccatgattggtgccactgccgatgcgattgataaagcagaagaccgccgtcgtttcgacgtagcgatgaagaaaattggtctggaaaccgcgcgttccggtatcgcacacacgatggaagaagcgctggcggttgccgctgacgtgggcttcccgtgcattattcgcccatcctttaccatgggcggtagcggcggcggtatcgcttataaccgtgaagagtttgaagaaatttgcgcccgcggtctggatctctctccgaccaaagagttgctgattgatgagagcctgatcggctggaaagagtacgagatggaagtggtgcgtgataaaaacgacaactgcatcatcgtctgctctatcgaaaacttcgatgcgatgggcatccacaccggtgactccatcactgtcgcgccagcccaaacgctgaccgacaaagaatatcaaatcatgcgtaacgccagcatggcggtgctgcgtgaaatcggcgttgaaaccggtggttccaacgttcagtttgcggtgaacccgaaaaacggtcgtctgattgttatcgaaatgaacccacgcgtgtcccgttctagcgcgctggcgagcaaagcgaccggtttcccgattgctaaagtggcggcgaaactggcggtgggttacaccctcgacgaactgatgaacgacatcactggcggacgtactccggcctccttcgagccgtccatcgactatgtggttactaaaattcctcgcttcaacttcgaaaaattcgccggtgctaacgaccgtctgaccactcagatgaaaagcgttggcgaagtgatggcgattggtcgcacgcagcaggaatccctgcaaaaagcgctgcgcggcctggaagtcggtgcgactggattcgacccgaaagtgagcctggatgacccggaagcgttaaccaaaatccgtcgcgaactgaaagacgcaggcgcagatcgtatctggtacatcgccgatgcgttccgtgcgggcctgtctgtggacggcgtcttcaacctgaccaacattgaccgctggttcctggtacagattgaagagctggtgcgtctggaagagaaagtggcggaagtgggcatcactggcctgaacgctgacttcctgcgccagctgaaacgcaaaggctttgccgatgcgcgcttggcaaaactggcgggcgtacgcgaagcggaaatccgtaagctgcgtgaccagtatgacctgcacccggtttataagcgcgtggatacctgtgcggcagagttcgccaccgacaccgcttacatgtactccacttatgaagaagagtgcgaagcgaatccgtctaccgaccgtgaaaaaatcatggtgcttggcggcggcccgaaccgtatcggtcagggtatcgaattcgactactgttgcgtacacgccagcctggcgctgcgcgaagacggttacgaaaccattatggttaactgtaacccggaaaccgtctccaccgactacgacacttccgaccgcctctacttcgagccggtaactctggaagatgtgctggaaatcgtgcgtatcgagaagccgaaaggcgttatcgtccagtacggcggtcagaccccgctgaaactggcgcgcgcgctggaagctgctggcgtaccggttatcggcaccagcccggatgctatcgaccgtgcagaagaccgtgaacgcttccagcatgcggttgagcgtctgaaactgaaacaaccggcgaacgccaccgttaccgctattgaaatggcggtagagaaggcgaaagagattggctacccgctggtggtacgtccgtcttacgttctcggcggtcgggcgatggaaatcgtctatgacgaagctgacctgcgtcgctacttccagacggcggtcagcgtgtctaacgatgcgccagtgttgctggaccacttcctcgatgacgcggtagaagttgacgtggatgccatctgcgacggcgaaatggtgctgattggcggcatcatggagcatattgagcaggcgggcgtgcactccggtgactccgcatgttctctgccagcctacaccttaagtcaggaaattcaggatgtgatgcgccagcaggtgcagaaactggccttcgaattgcaggtgcgcggcctgatgaacgtgcagtttgcggtgaaaaacaacgaagtctacctgattgaagttaacccgcgtgcggcgcgtaccgttccgttcgtctccaaagccaccggcgtaccgctggcaaaagtggcggcgcgcgtgatggctggcaaaagcctggctgagcagggcgtaaccaaagaagttatcccgccgtactacagcgtgaaagaagtggtgctgccgttcaataaattcccgggcgttgacccgctgttagggccagaaatgcgctctaccggggaagtcatgggcgtgggccgcaccttcgctgaagcgtttgccaaagcgcagctgggcagcaactccaccatgaagaaacacggtcgtgcgctgctttccgtgcgcgaaggcgataaagaacgcgtggtggacctggcggcaaaactgctgaaacagggcttcgagctggatgcgacccacggcacggcgattgtgctgggcgaagcaggtatcaacccgcgtctggtaaacaaggtgcatgaaggccgtccgcacattcaggaccgtatcaagaatggcgaatatacctacatcatcaacaccaccagtggccgtcgtgcgattgaagactcccgcgtgattcgtcgcagtgcgctgcaatataaagtgcattacgacaccaccctgaacggcggctttgccaccgcgatggcgctgaatgccgatgcgactgaaaaagtaattagcgtgcaggaaatgcacgcacagatcaaataatagcgtgtcatggcagatatttttcatccgctaatttgatcgaataactaatacggttctctgatgaggaccgtttttttttgcccattaagtaaatcttttggggaatcgatatttttgatgacataagcaggatttagctcacacttatcgacggtgaagttgcatactatcgatatatccacaattttaatatggccttgtttaattgcttcaaaacgagtcatagccagacttttaatttgtgaaactggagttcgtatgtgtgaaggatatgttgaaaaaccactctacttgttaatcgccgaatggatgatggctgaaaatcggtgggtgatagcaagagagatctctattcatttcgatattgaacacagcaaggcggttaataccctgacttatattctgagcgaagtcacagaaataagctgcgaagttaagatgatccctaataagctggaagggcggggatgccagtgtcagcgactggttaaagtggtcgatatcgatgagcaaatttacgcgcgcctgcgcaataacagtcgggaaaaattagtcggtgtaagaaagacgccgcgtattcctgccgttccgctcacggaacttaaccgcgagcagaagtggcagatgatgttgagtaagagtatgcgtcgttaattttatctcgttgataccgggcgtcctgcttgccagatgcgatgttgtagcatcttatccagcaaccaggtcgcatccggcaagatcaccgtttaggcgtcacatccgtcgtcccctgcaaacgggggcgattttcctccatttgcctcagtggctgcgtttcatgtaagcttacatgacagcgcccgacaagatcctgatactctttggtattcaaccgtttccagtgtaactcgtcgtcactaacattgcgtacagcgcgggctggcgtacccatcaacaactggcgtttctcgccgcgaaagcccgctttgacaaagctcatggcggcaacaatgctctcttcgccaatgaccgcgccatccataatcacgctgttcatcccgaccaatgcatcgcgaccaatcaaacaaccatgcaggatcgctccgtgcccgatatggccgttttccccaacgatagtgtcagtgtcgcagtagccatgcataatgcagccatcctgaatattggctcccgcttgcacgatcaaccgcccgtagtcaccacgcagactggcgagtgggccgatgtagacaccggctcccacaatcacatcgccaatcaagacggcactgggatggacaaacgccgtcgggtgaaccaccggaattaacccctcaaaggcgtaatagctcacggttgttaacgtcctttccacaccggatcgcgcttctcggcaaacgccagcggcccttcaatggcatcttcgctatgcagaacgcttggatagtgtttcaacacgccgctgcgaatatagcgatacgcttcttctaccggcatttcgctggtggtgcggtagatctctttcagcgccgcaatcgccagcggggcgctgttaaccagctgctgagccagttcgcgggcgttatccatcagttccgcctggctaaccacgcggttgactatcccccaacgcagcgcctcttctgcgcccattcgtctgccggtcatcaccatttcattgacgatggcaggcggcaggatcttcggcagacgcagcacaccgccgctgtcaggaacgatgcccagtttggcttccggcagggcgaagctggcgttatcggcacaaacaataaaatctgccgccagcgccagttcaaagccgccgccaaaggcatagccgttcacagctgcgataaccggtttgtcgagattgaaaatttcggttaatcccgcaaaaccacccggaccaaagtcagcatccggtgcttcgccttctgctgccgcttttaaatcccagcccgcggaaaagaacttctctccggcaccggtaataatggcgacacgtaattgcggatcgtcacggaaatttagaaatacttcgcccatttcaaagctggtttttgcatcaatagcattcgcttttggacgatcaagggtaatttccagaatacttccattgcgggtcagatgtaaactttcactcattccttttctccatttttgctttttcagggagctcaacatccctgcaaaaaatgcatattgttttagagtgtgattattagctggcagggtagttccctgctgtttcatttatttcagattctttctaattattttcccgctgcaattacgtggcagatcttttctgatctccagataagagggcactttaaatttcgccatattttgttcgcagaagcggaaaaattcctcttcgctcaatgtttcaccttcattcagcaccacaaatgctttgatggcttcatcgcgaatgctatctttaatacccacaaccacgatgtcctgaattttcgggtgcgcggcgataatattttccagctccacgcaggagacattctcgccgccacgtttaatcatattgcagcggcgatcgacgaaataaaaaaagtcctcttcgtcgcggtatccggtatcgccggtatgcagccagccatcggcttccagcactttcgcagtggcttgtgggttgagaaagtactctttgaagatggttttcccaggtatgcctttaatgcagatttcaccgatctcaccagccgggagcgggcgattgtgatcgtcgcggatctccgcttcgtagcaaaaccccacccgaccaatgctcggccagcgtcgtttatcgccaggacgatcgccgataatgcccacaatggtttccgtcatcccataagacgtcagcaagcgaacgccgaagcgttcacaaaacgcatctttttcctgctcgctcaagttgagataaaacatcacttcccgcaggcggtgttgctgatcgttcgcactaggcggctgtaccatcaacgtacggatcatcatcggaatacattcggtaacggtggcgcggtacttctgtacctgtccccagaaggcgcgggcgctgtatttctcgaccagcacaaaggtggccccggcagaaaacgccgccatcgccgcagtacactggcaatcgatatgaaacgcaggcattaccgtcaggtagacgtcatcgtcacgcagtgcacactgccaggcggagtaatatccagcgaagcgcaggttgtaatgggtaatcaccacacctttcggtcgggaggtggtgccggaggtgaagagaatttccgccgtatcgtcagtgcttagcggcggtgcatagcacaaggtggcaggttgttgatttttcagttgagtaaagctactcacgccatcatcagcgggaagtgccacatctgtcaggcaaatgtgccgcaattgagtggcatcttcctgctgaatctgttgatacataggatagaattgcgcactggtcaccagcaggcacgcctggctattttgcaggatccacgcgctttcctcgcacaacaggcgggcgttaatcggcaccataatcgcgccaatttttgccagcccgaaccagcaaaagataaattccgggcagttgtcgagatgtagtgcaaccttgtcgcctttgcgaatccccagcgtataaaacaggtttgccgtgcggttaatctcctgatttaactcaagataactataccggttaacgactccgccgctggattcacaaatcagcgccgttttatgaccgtaaacgtccgcaagatcgtcccacatttgacgtagatgttgtccgccaatgatatccattgcacctctatccatttttgttcgtttgttattgggcgggcgctagtcaggcaagccgactgacgccacgcgtttagtcctcaactttggccagacctttgctgaccaactcctgaatgtcgttttcgctgtagccgatatttttcaaaatggcagccgtgtccataccatgactgggcattccgcgccagatttgtccggggttatttttgaatttcggcatgatgttcggccctttgcaggtgcgaccatccatcgtttgccactgagtgatactttcgcgagccacatactgtggattgctttccagttccggtacggtcagcactttggcgcaggcgatattcagttcagcaaagcgttcttttacttccgcgatggtatgtgtcgccagccaggcatcgagtttctcttcaaccagtgggccgtaagggcattcgatacggtggataagctgagtgccttccgggatttctggcgtgccaagcagatgtgcgaggccaatatctttaaagcactcttcaatttgggtaatgcccaccagttccatcacgatgtagccgtcggcacatttatacagaccgcaaccggcgtagtagggatctttacctttgctcatgcgcgggcacatttcgccgccgttgaagtaatccatcatgaagtactggcccatacgcagcatcacttcatacatggcgatgtcgatactttcgcctttaccggtttcacgcactttatgcagtgctgccagcgccgccgtggtggcggtcaggccagaaaagtaatcggcggtatacgggaaggcaggcattggctggtcaacatcaccgttctgaatcaggtaaccactaaaggcctgggcgatagtgttataggccggaagattggtgtactcctcggtgccgtactgaccaaaaccggacaggtgagcgataaccagtttcgggttgtgctgccacagtacttcatcggtaatgccacgacgggcaaaggccggacctttactggcttcgatgaagatatcggtggtttccattaatttcagaaacgcttcgcggccttcatctttgaaaatatttaagctcagcgcgtgcaaattgcggcgggagagttgcgggtagttcggttgaacgcgaatggtgtcggcccaggcgacgttctcgatccagataacttccgcgccccattctgcgaacatttgcccggcaaacggtccggcgatttcgataccggagaagacaacgcgcaatccggccaacggcccgaatttcggcatgggtagatgatccattatttgctcctgaaaaatttatgtagcgcatgactgccggatgcggcgtaaacgctttatccggcctacattcgtgctcccgtaggcctgataagacgcatcagcgtcgcatcaggcagcgcacggacttagcggtattgcttcagcaccgcacgacccagcgtcaggatctgcatttcgtcagatcccccggagacgcggtctacacgcagatcacgccagaagcggctgatgcggtggttgcccgcaatcccgacaccgcccagcacctgcattgcgctatccacaacttcaaatgccgcattggcgcagaagtatttgcacatcgctgcatcgccagaggtgatggtgccgttgtctgctttccacgctgcttcatacagcatgtttttcatggagtttaatttgatcgccatgtgggcgaatttttcctgaatcaactggaaacgaccaatagcctcgccaaactgcacgcgctgattggcgtagcgcgccgcatcttcaaaggcgcacatcgccgtaccgtagttggtgagggctaccaggaaacgttcatggtcgaactcttctttgacgcggttaaagccgttaccttcccgaccgaacatgtctttctcgtccagttccacgtcgtcaaaggtgatttcacagcagctatccatacgcagaccgagcttttcaagtttggtcactttgatgcccggtttgctcatatcaacaaaccattcggtgtagacaggtttgtccggagaagccccgtcgcgcgccatcaccacgatgtacggggtgtaggcgctgctggtaataaaacacttactaccattaagataaatcttaccatttctacgggtataagtcgttttcaggctacccacgtcggagcccgcgcccggttcggtaatcgcactgttccacatctgcttaccggtgccgcggaaagccataattttgtcgatctgctcttgtgtgccttcgcgcaggaaggtgttgaacccgcccggcaactggtacagcacataggttggtgcccccagacgtcccagctccatccacacggcggcgagagtaacaaaccccgcgtccagaccaccgtgctcttcagggatcagcagactgtcgatacccatatccgccagtgctttgacaaaacgttccgggtagacgctgtcacggtcgcactcggcaaaataggcctcccagttttcgctggccatcagttcgcggataccggcgacaaacagttcctgctcatcatttaaattaaaatccatctttcaacctcttgatattttgggggttaattaatctttccagttctgtttcgcgtctttaataaaggagagcgtcaccataatgttgacgaagaacagcgggcatcctccggcgataatggcggtttgaatcggtttcaggccgccgagcgccagcagaacaataccgataatgccaaccagaatactccaaccgatacgcaccagcagaggtggttcttcaccatcgcgtacttcgcggcaagtggacatcgccagggtataagagcaggcgttaaccagcgtaacggtggcaataaagcagaggatgaagaagccccacatggtggcggtgctgagtggcagagcggcccaggtttcaatgatggcgcgcgccacaccgtactgttcgatcagatttggaatgttgatgatgtttttatctatcaacagcagagtgttactaccgagtacagtccacaggatccaggtactcgctgtcagccccagcaccatgccgaagcacagttcacgcacagtacgaccacgggagatgcgggcgaggaagatactcatctggatagcataaatcacccaccatgcccagtagaacacggtccagccctgcgggaagccgcctttagcgatgggatcggtatagaacaacatgcgcggcagatacatcagcaacatccccacgctatcggtgaagtagttcatgatgaagctggcaccgctgacaatgaacacccaacccagcatcaggaagctcaggtaactacgcacgtcactggcgatacgtacccctttttgcagaccgcaagcgacgcaaatggcgttgaggataatccagcaggtaatgatgatagcgtccagttgcagggtatgcggaatgccaaacaaccattgcatacactcggtcaccagcggcgtggcaaggcccagactggtacccatcgcgaagatcaaggcgacgagatagaagttgtcgacgatagtgccgaacaaccctttggcgtgtttttcacctaccagcggcaccagtgtgctgctggggcgaatcacttccattttgcggacaaagaagaagtaagcgaaggcgacactaaggaagctgtaagtggcccacggcagaggtccccagtggaacaagctgtaagccagccccaactctttcgcccctgtgctgttcggttctaagccaaacggcggggtggagatgtagtagtagatctcaatgcttccccagaacagtacggcagcagacgtacaggaggcgaacatcataaagatccaactggcggtgctaaattctggcggttcgttacctaaacgctttttggcatacgggccaaacaccagccagaaccaaccgaaaagcatcaccaccatataccattcaaatgcccatccccatacattggtgacgtaactgaatacagcattaataacgacattcgctgcatccagatctctgactgtaagccaacaaagtatgccgacgattattaacggcggaaagaaaaccttcggttctattcccgtttttctcttttcattcttcatgagttaattccactgtgaaaacgaatatttattttgcgttcccgtttgttttatttttgttaacatttaatataattattattaacctcgtggacgcgttaatggctaactcataatgggtattcaataagctgtattctgtgattggtatcacatttttgtttcgggtgaatagagggcgttttttcgttaattttgattaataatcagtttgttatgctctgttgtgagtaaaaaataacatctgactttcaatattggtgatccataaaacaatattgaaaatttctttttgctacgccgtgttttcaatattggtgaggaacttaacaatattgaaagttggatttatctgcgtgtgacattttcaatattggtgattaaagttttatttcaaaattaaagggcgtgatatctgtaattaacaccaccgatatgaacgacgtttccttcatgatttctggagatgcaatgaagattattacttgctataagtgcgtgcctgatgaacaggatattgcggtcaataatgctgatggtagtttagacttcagcaaagccgatgccaaaataagccaatacgatctcaacgctattgaagcggcttgccagctaaagcaacaggcagcagaggcgcaggtgacagccttaagtgtgggcggtaaagccctgaccaacgccaaagggcgtaaagatgtgctaagccgcggcccggatgaactgattgtggtgattgatgaccagttcgagcaggcactgccgcaacaaacggcgagcgcactggctgcagccgcccagaaagcaggctttgatctgatcctctgtggcgatggttcttccgacctttatgcccagcaggttggtctgctggtgggcgaaatcctcaatattccggcagttaacggcgtcagcaaaattatctccctgacggcagataccctcaccgttgagcgcgaactggaagatgaaaccgaaaccttaagcattccgctgcctgcggttgttgctgtttccactgatatcaactccccacaaattcctagcatgaaagccattctcggcgcggcgaaaaagcccgtccaggtatggagcgcggcggatattggttttaacgcagaggcagcctggagtgaacaacaggttgccgcgccgaaacagcgcgaacgtcagcgcatcgtgattgaaggcgacggcgaagaacagatcgccgcatttgctgaaaatcttcgcaaagtcatttaattacaggggatgctatgaacacgttttctcaagtctgggtattcagcgataccccttctcgtctgccggaactgatgaacggtgcgcaggctttagctaatcaaatcaacacctttgtcctcaatgatgccgacggcgcacaggcaatccagctcggcgctaatcatgtctggaaattaaacggcaaaccggacgatcggatgatcgaagattacgccggtgtcatggctgacactattcgccagcacggcgcagacggcctggtgctgctgccaaacacccgtcgcggcaaattactggcggcaaaactgggttatcgccttaaagcggcggtgtctaacgatgccagcaccgtcagcgtacaggacggtaaagcgacagtgaaacacatggtttacggtggtctggcgattggcgaagaacgcattgccacgccgtatgcggtactgaccatcagcagcggcacgttcgatgcggctcagccagacgcgagtcgcactggcgaaacgcacaccgtggagtggcaggctccggctgtggcgattacccgcacggcaacccaggcgcgccagagcaacagcgtcgatctcgacaaagcccgtctggtggtcagcgtcggtcgcggtattggcagcaaagagaacattgcgctggcagaacagctttgcaaggcgataggtgcggagttggcctgttctcgtccggtggcggaaaacgaaaaatggatggagcacgaacgctatgtcggtatctccaacctgatgctgaaacctgaactgtacctggcggtggggatctccgggcagatccagcacatggttggcgctaacgcgagccaaaccattttcgccatcaataaagataaaaatgcgccgatcttccagtacgcggattacggcattgttggcgacgccgtgaagatccttccggcgctgaccgcagctttagcgcgttgatccactctggcagggctgcattttggccctgccgctgacagggagctcttatgtccgaagatatctttgacgccatcatcgtcggtgcagggcttgccggtagcgttgccgcactggtgctcgcccgcgaaggtgcgcaagtgttagttatcgagcgtggcaattccgcaggtgccaagaacgtcaccggcgggcgtctctatgcccacagtctggaacacattattcctggtttcgccgactccgcccccgtagaacgcctgatcacccatgaaaaactcgcgtttatgacggaaaagagtgcgatgactatggactactgcaatggtgacgaaaccagcccatcccagcgttcttactccgttttgcgcagtaaatttgatgcctggctgatggagcaggccgaagaagcgggcgcgcagttaattaccgggatccgcgtcgataacctcgtacagcgcgatggcaaagtcgtcggtgtagaagccgatggcgatgtgattgaagcgaaaacggtgatccttgctgatggggtgaactccatccttgccgaaaaattggggatggcaaaacgcgtcaaaccgacggatgtggcggttggcgtgaaggaactgatcgagttaccgaagagcgttattgaagaccgttttcagttgcagggtaatcagggggcggcttgcctgtttgcgggaagtcccaccgatggcctgatgggcggcggcttcctttataccaatgaaaacaccctgagcctggggctggtttgtggtttgcatcatctgcatgacgcgaaaaaaagcgtgccgcaaatgctggaagatttcaaacagcatccggccgttgcaccgctgatcgcgggcggcaagctggtggaatattccgctcacgtagtgccggaagcaggcatcaacatgctgccggagttggttggtgacggcgtattgattgccggtgatgccgccggaatgtgtatgaacctcggttttaccattcgcggtatggatctggcgattgccgccggggaagccgcagcaaaaaccgtgcttagtgcgatgaaaagcgacgatttcagtaagcaaaaactggcggaatatcgtcagcatcttgagagtggtccgctgcgcgatatgcgtatgtaccagaaactaccggcgttccttgataacccacgcatgtttagcggctacccggagctggcggtgggtgtggcgcgtgacctgttcaccattgatggcagcgcgccggaactgatgcgcaagaaaatcctccgccacggcaagaaagtgggcttcatcaatctaatcaaggatggcatgaaaggagtgaccgttttatgacttctcccgtcaatgtggacgtcaaactgggcgtcaataaattcaatgtcgatgaagagcatccgcacattgttgtgaaggccgatgctgataaacaggcgctggagctgctggtgaaagcgtgccccgcaggtctgtacaagaagcaggatgacggcagtgtgcgcttcgattacgccggatgtctggagtgcggcacctgtcgcattctggggctggggagcgcgctggaacagtgggaatacccgcgcggcacctttggtgtggagttccgttacggctgatgttggtttgatacgtaacgccgcactgactctcattgcaaaaaacaggaataaccatgcaaccgtccagaaactttgacgatctcaaattctcctctattcaccgccgcattttgctgtggggaagcggtggtccgtttctggatggttatgtactggtaatgattggcgtggcgctggagcaactgacgccggcgctgaaactggacgctgactggattggcttgctgggcgcgggaacgctcgccgggctgttcgttggcacaagcctgtttggttatatttccgataaagtcggacggcgcaaaatgttcctcattgatatcatcgccatcggcgtgataagcgtggcgacgatgtttgttagttcccccgtcgaactgttggtgatgcgggtacttatcggcattgtcatcggtgcagattatcccatcgccaccagtatgatcaccgagttctccagtacccgtcagcgggcgttttccatcagctttattgccgcgatgtggtatgtcggcgcgacctgtgccgatctggtcggctactggctttatgatgtggaaggcggctggcgctggatgctgggtagcgcggcgatcccctgtttgttgattttgattggtcgattcgaactgcctgaatctccccgctggttattacgcaaagggcgagtaaaagagtgcgaagagatgatgatcaaactgtttggcgaaccggtggctttcgatgaagagcagccgcagcaaacccgttttcgcgatctgtttaatcgccgccattttccttttgttctgtttgttgccgccatctggacctgccaggtgatcccaatgttcgccatttacacctttggcccgcaaatcgttggtttgttgggattgggggttggcaaaaacgcggcactagggaatgtggtgattagcctgttctttatgctcggctgtattccgccgatgctgtggttaaacactgccggacggcgtccattgttgattggcagctttgccatgatgacgctggcgctggcggttttggggctaatcccggatatggggatctggctggtagtgatggcctttgcggtgtatgcctttttctctggcgggccgggtaatttgcagtggctctatcctaatgaactcttcccgacagatatccgcgcctctgccgtgggcgtgattatgtccttaagtcgtattggcaccattgttagcacctgggcactaccgatctttatcaataattacggtatcagtaacacgatgctaatgggggcgggtatcagcctgtttggcttgttgatttccgtagcgtttgccccggagactcgagggatgagtctggcgcagaccagcaatatgacgatccgcgggcagagaatggggtaaattgttcagatttctctcttttctgaatcaatattattgactataagccgcgtgaatatatgactacactttgtgggaaaacaaaggcgtaatcacgcgggctacctatgattcttataatttatgcgcatccgtatccgcatcattcccatgcgaataaacggatgcttgaacaggcaaggacgctggaaggcgtcgaaattcgctctctttatcaactctatcctgacttcaatatcgatattgccgccgagcaggaggcgctgtctcgcgccgatctgatcgtctggcagcatccgatgcagtggtacagcattcctccgctcctcaaactttggatcgataaagttttctcccacggctgggcttacggtcatggcggcacggcgctgcatggcaaacatttgctgtgggcggtgacgaccggcggcggggaaagccattttgaaattggtgcgcatccgggctttgatgtgctgagccagccgctacaggcgacggcaatctactgcgggctgaactggctgccaccgtttgccatgcactgcacctttatttgtgacgacgaaaccctcgaagggcaggcgcgtcactataagcaacgtctgctggaatggcaggaggcccatcatggataattaaggaatggcaggaggcccatcatggatagccatacgctgattcaggcgctgatttatctcggtagcgcagcgctgattgtacccattgcggtacgtcttggtctgggaagcgtacttggctacctgatcgccggctgcattattggcccgtgggggctgcgactggtgaccgatgccgaatctattctgcactttgccgagattggggtggtgctgatgctgtttattatcggcctcgaactcgatccacaaaggctgtggaagctgcgtgcggcagtgttcggctgtggcgcattgcagatggtgatttgcggcggcctgctggggctgttctgcatgttacttgggctgcgctggcaggtcgcggaattgatcggcatgacgctggcgctctcctctacggcgattgccatgcaggcgatgaatgaacgcaatctgatggtgacgcaaatgggtcgcagtgcctttgcggtgctgctgttccaggatatcgcggcgatcccgctggtggcgatgattccgctactggcaacgagcagtgccagcacgacgatgggcgcatttgctctcagcgcgttaaaagtggcgggtgcgctggtgctggtggtattgctggggcgctatgtcacgcgtccggcgctgcgttttgtagcccgctctggcttgcgggaagtgtttagtgccgtggcgttattcctcgtgtttggctttggtttgctgctggaagaggtcggcttgagcatggcgatgggcgcgtttctggcgggcgtactgctggcaagcagcgaataccgtcatgcgctggagagcgatatcgaaccatttaaaggtttgctgttggggctgtttttcatcggtgttggcatgagcatagactttggcacgctgcttgaaaacccattgcgcattgtcattttgctgctcggtttcctcatcatcaaaatcgccatgctgtggctgattgcccgaccgttgcaagtgccaaataaacagcgtcgttggtttgcggtgttgttagggcagggcagtgagtttgcctttgtggtatttggcgcggcgcagatggcgaatgtgctggagccggagtgggcgaaaagcctgaccctggcggtggcgctgagcatggcagcaacgccgattctgctggtgatcctcaatcgccttgagcaatcttctactgaggaagcgcgtgaagccgatgagatcgacgaagaacagccgcgcgtgattatcgccggattcggtcgttttgggcagattaccggacgtttactgctctccagcggggtgaaaatggtggtactcgatcacgatccggaccatatcgaaaccttgcgtaaatttggtatgaaagtgttttatggcgatgccacgcggatggatttactggaatctgccggagcggcgaaagcggaagtgctgattaacgccatcgacgatccgcaaaccaacctgcaactgacagagatggtgaaagaacatttcccgcatttgcagattattgcccgcgcccgcgatgtcgaccactacattcgtttgcgtcaggcaggcgttgaaaagccggagcgtgaaaccttcgaaggtgcgctgaaaaccgggcgtctggcactggaaagtttaggtctggggccgtatgaagcgcgagaacgtgccgatgtgttccgccgctttaatattcagatggtggaagagatggcaatggttgagaacgacaccaaagcccgcgcggcggtctataaacgcaccagcgcgatgttaagtgagatcattaccgaggaccgcgaacatctgagtttaattcaacgacatggctggcagggaaccgaagaaggtaaacataccggcaacatggcggatgaaccggaaacgaaacccagttcctaataaagagtgacgtaaatcacactttacagctaactgtttgtttttgtttcattgtaatgcggcgagtccagggagagagcgtggactcgccagcagaatataaaattttcctcaacatcatcctcgcaccagtcgacgacggtttacgctttacgtatagtggcgacaattttttttatcgggaaatctcaatgatcagtctgattgcggcgttagcggtagatcgcgttatcggcatggaaaacgccatgccgtggaacctgcctgccgatctcgcctggtttaaacgcaacaccttaaataaacccgtgattatgggccgccatacctgggaaagtatcggtcgtccgttgccaggacgcaaaaatattatcctcagcagtcaaccgggtacggacgatcgcgtaacgtgggtgaagagcgtggatgaagccatcgcggcgtgtggtgacgtaccagaaatcatggtgattggcggcggtcgcgtttatgaacagttcttgccaaaagcgcaaaaactgtatctgacgcatatcgacgcagaagtggaaggcgacacccatttcccggattacgagccggatgactgggaaagcgtattcagcgaattccacgatgctgatgcgcagaactctcacagctattgctttgagattctggagcggcggtaattttgtatagaatttacggctagcgccggatgcgacgccggtcgcgtcttatccggccttcctatatcaggctgtgtttaagacgccgccgcttcgcccaaatccttatgccggttgctcggctggacaaaatactgtttatcttcccagcgcaggcaggttaatgtaccaccccagcagcagccggtatccagcgcgtatataccttccggcgtacctttgccctccaggcttgcccagtgaccaaaggcgatgctgtattcttcagcgacagggccaggaatcgcaaaccacggtttcagtggggcaggggcctcttccgggctttctttgctgtacatatccagttgaccgttcgggaagcaaaaacgcatacgggtaaaagcgttggtgataaaacgcagtcttcccagcccccgcaattccggactccagttatttggcatatcgccgtacatggcatcaagaaagaagggataggagtcactgcttagcaccgcttctacatcgcgtgcgcactctttggcggtctgcagatcccactgcggcgtgatccctgcgtgggccatcaccagctttttctcttcgtcgatttgcagcagaggctggcgccgcagccagttaagcagctcgtcggcatccggcgcttccagcagcggtgtcaggcgatctttcggtttattgcggctgatcccggcaaataccgccagcagatgcagatcgtgattgcccagcaccagacgtacgctgtcgcctaaggatttcacatagcgcagaacatccaggctacccggcccgcgcgcgaccagatcgcccgtcagccagagggtatctttcccaggggtaaattctactttatgcagcaatgcgatcagttcatcgtaacaaccatgaacgtcgccaataaggtatgtcgccatattcttttaatgaatgagtgtgggaacggcgagtcggaatacgggaatgtcgatgctgaaagggacgccattttcatcgatcatttcgtagtgaccctgcatggtgcccagcggggtttcaatgattgcaccgctggtgtactggtactcttcgccaggcgcgataagtggctggacgccaaccactccttcgccctggacttcggtttcacggccattgccattggtgatcagccagtaacgccccaacaactgcactggcgctcgccccagattgcgtatggttacggtataagcaaaaacgtaacgttcattatcaggactagattgagcctcaatgtagacgctttgaacctgaatacacactcgggggctattgatcatcgttaactctcctgcaaaggcgcgttctccgccagatagttcgccatctggcaatattgcgcgacagagatattttccgctcgcatcgccgggtcgatccccattcccgttaacacctcgacgctaaacaggttgccgaggctgttacgaatggttttacgacgctggttaaaggcttcggtggtgatgcggctcaacacacgaacatctttaaccgggtgaggcatcgttgcatgaggaaccaggcgcacgacggcggaatccactttgggtggtggtgtaaaggcactcggcggtacttccagtaccgggatcacattgcaatagtattgcgccatgacgcttaatcgaccatacgctttgctgttcggtcctgcaaccagacgattcaccacctctttttgcaacataaagtgcatgtcggcaatggcatcagtatagctaaacagatggaacatcaacggcgtggagatgttataaggcaggttgccgaaaacacgcagcggctgacccattttctcggccagttcaccaaagttaaaggtcatcgcatcctgctgataaatcgtcagtttcgggcctaagaatggatgcgtttgcagacgtgccgccagatcgcggtcaagttcgatgaccgtcagctggtccagacgttcgccgaccggttcggtcaatgccgccagaccggggccgatttcgaccatcgcctggcccttttgcgggttaatggcagacacaatactgtcgatcacgaactgatcgttgagaaagttttgcccgaagcgtttacgggctaagtggccctggtggactcgattattcattgggtgttaacaatcattttgatggcgagattaagcgccgtaataaaactgccggcatcggctttgccacgtcccgccagttcaagcgcggtgccgtggtccacacttgtgcgaataaagggcaggcccagcgtaatgttcacaccgcgcccgaagccctggtattttagcacgggaagaccctgatcgtggtacatcgccagcacggcgtcggcgttatcaagatatttcggctgaaacagggtatcggcaggcagcggcccgttgagtttcatcccctgcgcccgcagctcattgagcaccggaataatggtgtctatctcttccgtacccatatgaccgccttcgcccgcgtgcggattcagcccgcagaccagaatgcgcggttcggcaataccaaatttggtccgcaaatcgtgatgcaaaatagcaatcacttcgtgcaaaagtgcaggggtgatagcgtctgcgatatcgcgcagcggtaaatgcgtcgttgccagcgccacgcgaagttcttcggtcgccagcatcatcaccacctttttcgcctggctacgctcttcgaaaaactcggtatgaccggtaaaaggaatgccagcgtcgttaataacgcctttatgcaccggacctgtgatcagcgcggcaaattcgccgttcagacaaccatcgcacgctcgcgccagcgtttccaccacataatgcccattttcaaccgctaactgccccgcagtgacaggtgcacgtagcgcgacaggaagtagcgttaatgtgcccgcagtttgcggttgtgcaggggagttgggggaataagggcggagggtgagcggcaaaccgagcatcgctgcccggttggtaaggagagtggcatcggcacaaacaaccagttcgaccggccactcacgctgtgcaagctggacaactaagtccgggccaatcccggcgggctcgccgggagtgatcacaacacgttgggttttaaccattagttgctcaggattttaacgtaggcgctggcacgttgttcctgcatccagcttgctgcttcttcgctgaacttacggttcatcagcatgcggtatgcacgatctttctgcgcagcgtcggttttatcgacattacgggtatccagcagttcgattaaatgccagccgaaactagagtgaaccggtgcactcatttgacctttgttcaggcgagtcagggcgtcacggaaggccggatcgaaaatatctggtgtagcccagccgagatcgccgccctggttagcagagcctggatcctgagagaactctttcgctgcggcagcaaaagtcgttttaccactcttgatatcagcagcaatctgttccagtttcacacgggcctgttcgtcagtcatgatcgggctcggtttcagcagaatatggcgagcatgaacttcggtcacgctgatatttttgctttcgccgcgcaggtcgttaactttcagaatatggaagccaacgccggaacgaatcgggccaacaatgtcgcctttcttcgcggtgcttaatgcctgggcgaagatcccgggcaactcctgaatacggccccagcccatctggccgccgttcagcgcctgctggtcggcagaatgagcaatcgccagcttaccgaaatcagcgccgttacgcgcctgatcgacaatggcgcgcgcctggctttccgcttcgttcacctgatcagaggtcgggttttccggcagcgggatcaggatgtggctcaggttcagctcagtgctggcgtcgttttggttacccacctgctgcgccagggattcgacttcctgcggcaggatggtgatgcgacgacgcacctcgttgttacgcacttcagagataatcatctctttgcggatctggttacgataggtgttgtagttcagtccatcgtaagccagacggctgcgcatctgatccagcgtcatgttgttctgtttcgcgatgttagcaatcgcctgatccagctgctcatcggagattttcactcccattttctgccccatctgcaggatgatttgatccatgatcaaacgttccatgatttggtggcgcagcgtcgcgtcatcaggaagttgctgccttgcctgagcagcgttcagttttacgctctgcattaatccatcaacgtcgctttccagcacgacgccgttattgacgacggctgcgactttatcgactacctggggggcagcgaaactggtattcgcgatcatggcgataccgagaagcagcgttttccagttcttcatactttttccatttcaattaaccgcactgcggattacgtggtaaatcaacaaatcacaaagtgttttgatacggcagaatgttgctacgcagcatctcttgcgtacccagaccgtagttggagctcaggccgcgaagttcgatgttaaagccgattgcgttgtcatataccgcatgttgtttatcgttatcccaaccgttcagcttccgctcgtaaccgacgcgaattgcatagcagcaggagctgtattgcacacctaacatagagtcggcttgcttgttagcattggtgtcgtagtagtaggccccaacaatggaccaacgatcggcaattggccagctggcgacagcacctacctggctaataccattcttatattgctcagcagtggaatagtacttaggcagcgtagcctgaatatattccgggctggcgtaacggtaattcagctgtaccagacggtcttcatcccgacggtattcaatgctggagttactggtcgctacgttatccagacgtgtatcgtactgaatcccgccacgcaatccccaacgctcggagatacgccagtaagtatcgcctgcccacaccagactacccgttttgtcgtcattctcccatgttatgttgtcatcgccagtgcgagactccgtgaaatagtagatttgaccaacggaaatattaaaacgttcaacggcagcatcatcatatatgcgagatgtgacaccggtcgtcacctggttagcggaggcaatacggtcaagaccgccgtaagtccggtcccggaacaggccagagtagtcagattgcagcagagagctgtcgtagttatagatgtcgctctgatcgcgatacggcacgtacaaatactgcgcgcgcggttccagcgtttgggtataacccggagccagcatttccatatcgcgttcaaagaccattttgccgtcaactttgaattgcggcattacgcggttaacggattcgtccagcttggtcgtgtttctggagttataccagtcaagattggtttgctgataatgggttgccagcaacttcgcttcggtattgatgctgccccagttattagagagcggcaaattgatggtcggttccaggtgaacacgggttgcttcaggcatgtcgtctctggtgttaacaaagtgcactgcctggccgtaaatacgcgtatcaaacggaccaacatcattctggtagtaattaacgtctaactgcggctctgcgctgtagctactggtgttctgttcgctgaaaacctggaactgcttggtactaacggtggcattgaagttttgcaccgcatagccaacgctgaatttttgcgttgcgtagccgtcagtactggaaccgtacttgttatcgaaatcattgaagtagctaggatcgctgaccttggtgtagtcgacgttgaaacgccacacctgatccatgaccccggagtggttccagtagaataaccaacgacgactactgtcatcgttcgggtgttcatcttcatagactttatcactaggcagatagtccagttccatcaagccagcgcccgcctgggagaggtagcggaattcgttctcccacatgatgttgccacgacgatgcatataatgcggcgtgatggtggcatccatatttggcgcgatgttccagtaatatggcaggtagaactcaaagtagttggtggtggtgtacttggcgttcgggatcaagaaaccagagcgacgtttgtcacccaccggcaactgcaaataggggctataaaagatcggtaccggacccaccttaaagcgggcgttccagatctccgcaacttgttcttcgcggtcatgaataatttcgctacctaccacgctccaggtgtcagaacccggcagacaggaggtaaagctaccgttatccagaatggtatagcggttttcgccacgttgtttcatcaggtccgctttaccgcgaccctggcgacccaccatctggtaatcaccttcccagacgttggtatctttggtgttcagattcgcccagcctttcggccctttgaggatcacctggttatcgtcgtaatggacattaccgagcgcatcaacggtacgtaccggctccggttgtcctggtgcctctttttgatggagctgcacttcgtcggcctgcagacggctgttaccctgcatgatatccacgctgccagtaaacacggcgtcatccgggtagtcccctttcgcgtggtcagcattgatagtcacgggtaagtcattggtatcgccctgtaccagaggacggtcatagcttggcacgcccaacatgcactgactggcgaggtcggctgccagtccctgttgactataaagggcggtggcaatcatggtggccaggagagtggggatacgttttttcatacgttgattttattgttccatcatcggtaacgttgcgcgtgacaaacggtcagagactaacgtactcgtcatctctacgctagtgttaatcctgtccgaatagcgtcagtggtgttaggcacggcattgaatgacaggtatgataatgcaaattataggcgatgtcccacaattgaccgcagccggaaaacggtaaaagcacctttatattgtgggagatagccctgatatccgtgtgtcgatttggggaatatatgcagtattggggaaaaatcattggcgtggccgtggccttactgatgggcggcggcttttggggcgtagtgttaggcctgttaattggccatatgtttgataaagcccgtagccgtaaaatggcgtggttcgccaaccagcgtgagcgtcaggcgctgttttttgccaccacttttgaagtgatggggcatttaaccaaatccaaaggtcgcgtcacggaggctgatattcatatcgccagccagttgatggaccgaatgaatcttcatggcgcttcccgtactgcggcgcaaaatgcgttccgggtgggaaaaagtgacaattacccgctgcgcgaaaagatgcgccagtttcgcagtgtctgctttggtcgttttgacttaattcgtatgtttctggagatccagattcaggcggcgtttgctgatggtagtctgcacccgaatgaacgggcggtgctgtatgtcattgcagaagaattagggatctcccgcgctcagtttgaccagtttttgcgcatgatgcagggcggtgcacagtttggcggcggttatcagcagcaaactggcggtggtaactggcagcaagcgcagcgtggcccaacgctggaagatgcctgtaatgtgctgggcgtgaagccgacggatgatgcgaccaccatcaaacgtgcctaccgtaagctgatgagtgaacaccatcccgataagctggtggcgaaaggtttgccgcctgagatgatggagatggcgaagcagaaagcgcaggaaattcagcaggcatatgagctgataaagcagcagaaagggtttaaatgaccctgtaaatgatgctgagtaactgcccacgattaaaggtggccgccctggcggtcacttctttgagaaaaggcgtttactcagaatggtggacaggctcaatgcacgatttacgggaggggttctgtaggttttatcgcgttgaccctgcttaaggttgagagctttacgacgagcggaattatatttttacgtcttaaaaataaaaaacacatacctgaatgagcgatttttgaaagtatatttattcagaacgcgcatcatgagtttttaactcaatgcgaggctattaccatgaaagtaagtgttccaggcatgccggttacacttttaaatatgagcaagaacgatatttataagatggtgagcggggacaagatggacgtgaagatgaatatctttcaacgcttgtgggagacgttacgccatctgttctggagtgataaacagactgaggcttataaacttctgttcaatttcgtgaataaccagactggcaacatcaacgccagtgaatactttactggggctatcaacgagaatgagagagaaaagtttatcaatagcctggaattattcaataaacttaaaacatgcgcaaaaaatccggatgagttggtcgcaaagggcaatatgcgctgggtcgcccagaccttcggggatatcgagttaagtgtcacttttttcattgaaaagaataagatatgtactcagacgttgcagctgcataagggccaaggtaacttgggcgttgatcttagaaaggcttaccttcccggcgttgacatgagggattgttaccttggtaaaaaaacaatgaaaggtagcaatgatatcctttatgagagacctgggtggaatgctaacctgggcgtgctaccccggacggtgctaccccggacggtgctaacccggacggtgctaacctggacggtgctaccgtgaacggtgctacctccttatatgatgaggtaattattattaataaaatcccccccaaaaaaattgatactaaaggagttgctactgaagaagttgctactaaaaaagtactgctgaacaaattactgacaacgcaattattgaatgagccagaataagctaaggttgaaggggctggaacgccccttcaaccttagcagtagcgtgggatgatttcacaattagaaagacctgcatgatgagctagagaagaggctagtgacgcaaggcgtcgtgcaggacacggatcaccgagatgggcatcgccaaccagactgctaattagcccatgaataacaatcagaaaggaccataacagacccgttaaaatgaaatataagagacggtcaacgggtgaagaaaaagttcaaaaattcgctgtggagcaggaagggaattaccgaatggaaagcgtagccacacgcaacaactgaaagcagtttggcagaaacaaaaaatccccggactcggggatttatgtacaagaggcagcccttaggatgagggtataaacgtacaggaaaggttaaaaatccgctggcgctttaaacgtcatactattgccatacgccggatgggtaatcgtcaacatctctgcatgtagcaacaaacgtggtgccatcgctctcgcttctggacttgcataaaaacgatcgccgagaatcggatgacccagcgccagcatatgcacacgcaattgatggctacgcccggtaatcggttttaacaccactcttgccgtgttatccgccgcatactccaccacttcatattccgtctgcgcaggtttacccgtttcgtaacagactttctgtttcgggcggtttggccagtcgcaaatcagcggcagatccaccagaccttctgcgggggatggatgcccccagacgcgggccacatactgctttttcggctcgcgctcgcggaactggcgttttaactcccgctccgcggctttggtcagcgccactacaatcacgccgctggtagccatatccagacgatgcacgctttctgcctgcggataatcacgctgaatgcgcgtcatcacgctgtctttgtgctcttccagacgacccggcacactcaacaaaccgctcggcttgttgaccaccataatatggtcatcctgatacaggataaccaaccagggttcctgcggtggattgtagttttccatccccattttcggctccgttactgatgcgttacaacgatcaaacgcagggcatccagacgccaacctgcctgatccaggctttccattacctgctgacggttgctctcaatggcggtcagttcgtcgtcacgaatgttcgggttcactgcacgcagagcttccagacgagacagctcggcagacagtttttcgtcggcttcgttacgcgctgcatcaatcaatgcacgggcagatttctcgatctgcgcttcacccagttgaaggatagcgtgaacatcctgctgcacggcgttaaccagtttgctgccggtgtgacggttaaccgcgttaagctggcggttaaaggtttcaaactctacctgcgccgccaggttgttgccgtttttatccagcagcatacgtaccggcgtcggtggcaggaagcggttgagctgcaactgcttcggagcctgggcttcaaccacataaatcagttccaccaacagcgtacctaccggcaacgctttgttttttaacagactaatcgtgctgctaccggtatcgccagaaaggatcagatccagaccgttgcggatcagcggatgctcccaggtaataaactgtgcatcttcacgcgccagcgccacttcacgatcaaaggtgatggtgatgccatcttcgctcaggccagggaagtccggcaccagcatatgatcggacggcgtcagcacgatcatgttgtcgccgcgatcgtcctgattgataccgataatatcgaacaggttcatggcgaaggcgatcaggttggtatcgtcatcctgctcttcaatgctttctgccagtgcctgggctttttcgccaccgttggagtggatttccagcaggcggtcacgaccctgttccagctgtgctttcagcgcttcatgttgctcgcggcagtttttgatcagatcgtcaaagccttcggtttgatccggactagccagatagttaatcagatcgttgtatacgctatcgtaaatagtgcgtccggtcgggcaggtgtgctcaaatgcatccagaccttcgtgataccagcgcaccagcacgctctgagcggttttctccagataaggcacatggatctgaatatcgtgcgcctggccgatacgatccagacgaccaatacgctgctccagtagatccgggttgaatggcaggtcaaacatcaccatgtggctggcgaactggaagttacgtccttcagaaccgatttcactgcacagcagtacctgtgcgccggtgtcttcttcggcaaaccaggcggcagcgcggtcacgttcgataatgctcataccttcgtggaacaccgcagcgcgaataccttcacgttcgcgcagtacctgctccagttgcagcgcagtggcagctttggcgcagatcaccagcactttctgagagcgatggctggtcaggtagcccatcagccactcaacgcgcggatcgaagttccaccaggtggcgttatcaccttcaaattcctgataaatacgctccgggtagagcatatcgcgagcacgatcttccgcacttttacgtgcgcccataatgccggagactttaatagccgtctgatactgcgtcggtagcggcagcttaatggtgtgcagctcgcgtttcgggaatcctttcacaccgttacgcgtgttacggaacagcacgcggctggtgccgtggcgatccatcagcatgctaaccagctcctgacgggcgctctgggcatcttcgctgtcgctgtttgctgcctgcaacagcggctcgatatcctgctcgccgatcatctcgccgagcatgttcagttcgtcattgctcagtttgttacctgccagcagcatggcaacggcgtccgcaaccggacgataatttttctgctcttcaacgaactgcgcaaaatcgtggaaacggttcgggtccagcagacgcagacgggcgaagtggctttccatccccagctgttccggggtcgcggtcagcagcagaacgcccggcacgtgctctgccagttgttcaatggcctgatattcacggcttggcgcatcttcgctccacaccaggtgatgcgcttcatcgaccaccagcaggtcccattcggcttcacagagatgttccaggcgctgtttgctacgacgggcaaaatccaggctgcaaatcaccagctgttcggtgtcaaacgggttgtaagcatcgtgctgagcttcggcataacgctcatcatcaaatagcgcaaagcgcaggttgaaacggcgcagcatttctaccagccactgatgctgtaaggtttccgggacgataattagcacacgttcagcagcgccagagagcagttgctgatgcaggatcatcccggcttcaatggttttccctaaacccacttcgtcagccagcaggacgcgcggcgcgtggcggcgaccaacatcatgagcgatgttgagctgatgcgggatcaggctggtacgctgaccgcgcaggccgctgtacggcatacggaactgttcgctggaatatttacgcgcgcgataacgcagcgcaaagcggtccatacggtcaatctgcccggcaaacagacggtcctgcggtttgctgaacaccagtttgctatcaaggaaaacttcacgcagggctacgccggactcttcagtatccaggcgagtaccgatataggtcagcaagccattttcttcttttacttcttcgacttgcatctgccagccgtcatggctggtaatggtatcaccagggttgaacatcacgcgggtcacgggggaatcactgcgtgcgtacagacggttttcaccagtagatgggaaaagtaaagtgacagttcgcgcatccaccgcgacaacggttccaagtcccaattcgctttctgtatcgctgatccagcgttgaccaagtgtaaaaggcatatgtgttcggctctatatctttaattgcaggcaataaccacccgctaccgtgcttatgaggtagtggtgttattcaggtccaggaatggaaagggcgctatggtactggatggcaaagcattcgtcacgcatcaaaatggtatctggcgaactcttttttttgctcaaaatagcccaagttgcccggtcataagtgtagcaaaattatcctcaataaaagggagtattccctccgccacgggttgtagctggcgggtcagatagtgttcgtaatccagtggactacgttggtagtccagcggctccgggccgttggtggtccatacgtacttaatggtgccgcgattctgatattgcaaggggcgaccacgcttttggttttcttcatcggcaaggcgagcggcgcgtacatgaggcggcacattacgctgatactcgctcagcggacggcgaaggcgtttacggtaaaccagtcgcgcatccagttcacccgccatcagtttgtcgatggtttcgcgtacatattcctgatatggctcgttgcggaagatgcgcaggtatagctcctgctgaaactgctgggccagcggcgtccagtcggtgcgcacggtttccagccctttaaacaccatccgctgcttgtcgccctcctgaatcagtccggcataacgctttttactgccggtatcggctccgcgaatggttggcatcagaaaacggcagaaatgggtttcatactccagttctaatgcgctggtcagccgttgtttttgcagcgtttccgcccaccaggcgttaacgtgctgcaccagtgcacgaccgattttcgccgcttcttcttcgctatgtgcgcctttcagccagacaaacgtactgtcggtatcgccgtagataacgtcgtagccctgtgcttcaatcaacgctttggtttgccgcatgatctgatgaccacgcatggtgatgctgcttgccagccgcggatcgaagaagcggcaggcggtggtgccgagcacgccataaaaggcattcatgatgattttcagcgcctggctcagcggtttgttaccctggcgtttggcttcatcgcgcccgtgccagatgttagtcacaatctccggcaggcaatgtttttctcggctgaaccaggcatcgagaaaaccttcggtactgtgctctggatcaggctgcgccatgccttccaccagcccgacgggatcaatcagaaaggtgcggatgatgctcgggtacaggcttttatagtccagcaccagcacactatcataaagccctggccgactatccatcacgtagccgccagggctggcgtgcggcggcacttcgccgagattaggcgcgacataaccagcgcgatgcattcgcggaaaatagagatgaccaaatgccgccacgctaccgccgtgtcggtccaccggcaggccgttcaccgttgcccgttcgagtaaaaatggcatgatttcagttttgtggaagatctgcgtcaccagctcgcaatctttcaggttataagttgccagcgcaggtttatcttcggcgaaacggcggtcaatttcgtccattcgatcccacgggttatcgatagattttccttcgcctaatagctcctgagcgacagtttccaggctgaaactagagaaattccagaacgcggatttcagcgcctcgataccgtcgataattagccgacctttagcctgggcaaaaaagacgccgtttttaaagccgtgctcgcgccactccagctcgctattatcgcgcccaagacgcagcggaagacggtaacgctcggcatgtttttgcagcattcgcagatcgaactgcaccacgttccaaccgatgatcacatcaggatcgtagttggcaaaccaggcgttgagtttttccagcaactgcgggcggctggcgacgtattccagttcgaaatcaaggctggaggcgtcgccattctccggccccagcatataaacgatgcgctgcccgcagccttccaggccgatgcagtacagctcaccgtggcgggtggtttcaatatctatagaaacccacttgagcggcggacgatagtcgggatgcggtttcagacgggcattaacgatagtgccattgtgcatatcaccctcgacccacaccggactggtgataaaccgctccatcagatagcgttctggcggacgcacatcggcctcgtagacggtaacgccaccttcacgcaggcgcttttcgtaattcatcaattggcgatgggcgcgacagtaaaggccatacaccggctggcggtgaaaatcctttaacgccagcggtgtcaggcgaaagccttgttcaccctgcaaaatatgctgagcgcggggaacctgatcggcgggaataaacgccacggactcttgcggtgcaagcgtaacctgcaacggcccgttgtccgtcgccagccagaaggagacttctgtcccttgcggggtgtcccgccagtgtcgggttaagataaaacctgcctgcgccacgctgaaaatccatcaaaaaaccaggcttgagtatagcctggtttcgtttgattggctgtggttttatacagtcattactgcccgtaatatgccttcgcgccatgcttacgcagatagtgtttatccagcagcgtttgctgcatatccggtaactgcggcgctaactgacggcagaatatccccatataagcgacctcttccagcacgatggcgttatgcaccgcatcttcggcatttttgccccatgcaaacgggccgtgggaatggaccagaacgccgggcatttgcgctgcatcgataccctgtttttcaaaggtttctacgatgacgttaccggtttcccactcatattcgccgttgatttctgcgtcggtcattttgcgggtgcagggaatggtgccgtagaaatagtcggcgtgggtggtgccggttgctggaatgctctgacccgcctgcgcccagatggtggcgtggcggctgtgcgtatgcacaatgccgccaatggaggggaatgcctgatagagcagccggtgagttggcgtgtcggaggagggctttttcgtaccttcaaccacttcaccggtttcgatgctaaccacgaccatatcgtcagcggtcatgacgctgtaatcgacgccggaaggtttgatcacaaagacgccgcgctcgcgatcaacggcgctgacgttgccccatgtgagcgtgaccaggttgtgttttggcagcgccaggttggcttctaatacctggcgtttgagatcttctaacatgttgactccttcgtgccggatgcgctttgcttatccggcctacaaaatcgcagcgtgtaggcctgataagacgcgccagcgtcgcatcaggcgttgaatgccggatgcgctttgcttatccggcctacaaaatcgcagcgcgtaggcctgataagacgcgccagcgtcgcatcaggcgttgaatgccggatgcgctttgcttatccggcctacaaaatcgcagcgtgtaggccagataagacgcgtcagcgtcgcatcaggcgttacataccggatgcggctacttagcgacgaaacccgtaatacacttcgttccagcgcagcgcgtctttaaacgctggcaggcgtgtgtcgttatcaatcaccgtgatttcaatgtcgtgcatctcggcgaattggcgcatatcgttgaggttcagtgcatggctgaagacggtatggtgcgcgccaccagcgaggatccacgcttcggaagcagttggcagatccggttgcgctttccacagcgcattcgccaccggcagtttcggcagggagtgcggtgttttcaccgtgtcgatgcagttaaccagtagacggtaacgatcgccgagatcaatcaagctggcgacaatcgctgggccggtttgggtattgaagatcaggcgggcaggatcgtccttaccaccaataccgagatgctgaacgtcgaggatcggtttctcttctgcggcgatgctcgggcagacttccagcatatgggagccgagcaccaggtcattacctttctcgaagtgataggtgtagtcctccataaaggaggtgccgccctgcagaccggtactcatcaccttcatgatgcgaagcagggcggcagttttccagtcgccttcgcccgcaaagccgtaaccctgctgcatcagacgctgtacggccagaccaggaagctgtttcagaccgtgcaaatcttcaaaggtggtggtgaacgcgtggaagccaccttgttccaggaaacgcttcatccccagctcaatacgcgccgcttccagcacgttctgtcgttttttgccgtggatttgtgtggcaggcgtcatggtgtagcagctttcgtactcatcgaccagcgcgttaacatcgccgtcgctgatggagttcaccacctgcaccagatcgccaaccgcccaggtattgacggagaaaccgaacttgatctgtgcggcaactttatcgccatcggtgaccgccacttcacgcatgttatcgccaaatcggcagactttcagatgacgggtatcctgtttagagaccgcctgacgcatccaggagccgatacgctcatgggcttgtttatcctgccagtgaccggtaaccacggcatgttgctgacgcatacgcgcgccaatgaagccgaactcgcgaccgccatgtgcagtctggttcaggttcataaagtccatatcgatactgtcccacggcagcgccgcgttgaactgggtgtggaattgcagcaacggtttgttgagcatggtcaggccgttgatccacattttggccggggagaaggtgtgcagccacaccaccagaccagcgcaacgatcgtcgtaattcgcgtcgcggcaaatagcggtgatttcatccggcgtggtgcccagcggtttcaacaccagtttgcagggcagtttcgcttccgtattcagcgcattaacgacgtgctcggcatgttgggtgacctgacgcagggtttccgggccatacagatgctggctgccaatgacaaaccacacttcataattatcaaaaatcgtcattatcgtgtccttatagagtcgcaacggcctgggcagcctgtgccggggcggaagttggaagatagtgttgttcggcgctcatcgcccattgctgatagcggcgataaagctgttcaaagcgttgtgcctgctcgctgcacggttgcagggttttctctaccgcactggccattttttgctgagcacttgggatgtctgcgtgcactttcgcggcgacggcagcaaaaatcgccgcaccgagcgcacagcactggtcagaggcaacaatttgcagcgggcgattcagcacgtcgcagcaggcctgcataatgacctggtttttccgcgcgatgccgcccagtgccatcacgttattaacggcgatcccctgatcggtaaagcactccatgattgcgcgtgcgccaaaggcggtggcagcaatcaaaccgccgaacagcagcggagcgtcggtagcgaggttaagatcggtaatcacccctttcaggcgttggttagcgttcggtgtgcggcggccgttaaaccagtcgagcaccaccggcaggtgatccagagacggatttttggcccatgcttcggtcagcgccggaagcagttgtttctggctggcgttgatttgcgttttcagttccggatgctgggcggcaagctgttccagcggccagccgagtacgcgaccaaaccaggcgtagatatcaccaaacgcgctttggcctgcttccagaccgataaatccaggcaccacgctgccatcaacctgaccgcaaatacctttaactgcccgctcgccaacgctctgtttgtcggcaatcagaatgtcgcaggtggaagtaccgataacttttaccagtgcgttaggctgtgcgcctgcgccaactgcgcccatatggcagtcaaacgcgccgccggaaatcaccacgctttcaggcaggccgagacgctgcgcccattccgggcataaggtgcccaccggaatatcggcagtccaagtgtcagtgaacagcggggaaggcaaatggcgattgaggatcgggtccagctcatcaaagaaactggctggcggcaggccgccccagctttcgtgccacagagatttatgcccggcgctgcaacgtccgcgacgaatatcctgcgggcgggtggtaccggaaagcagagctggcacccagtcgcacagctcaatccagcttgcggcagattgcgccacggcgctgtcctggcgagtcacatgcaggatttttgcccagaaccattcgctggaataaataccaccaatgtagcgggagtagtcaacgttgcccggcgcgtggcacaaacgggtaatctcttccgcttcttcaaccgcagtgtggtctttccacaatacgaacatcgcgttcgggttttcggcaaactccgggcgcagcgccagcacgtttccgtcggcatcaatcggtgcgggcgtgctgccggtactgtcaacgccaatcccgaccacagctgcgcgctgttcgacgctaagctctgcaagcacggttttcagtgccgcttccatactctcaatgtagtcacgcggatgatgacggaactggttattcggggcatcacaaaattgccctttctgccaacggggataccactctacgctggtggcgatctcttcaccggtagcgcagtccaccgccaaagctcgcacagaatcactgccaaaatcgaggccaattgcaatcgccatcgtttcactccatccaaaaaaacgggtatggagaaacagtagagagttgcgataaaaagcgtcaggtaggatccgctaatcttatggataaaaatgctatggcatagcaaagtgtgacgccgtgcaaataatcaatgtggacttttctgccgtgattatagacacttttgttacgcgtttttgtcatggctttggtcccgctttgttacagaatgcttttaataagcggggttaccggttgggttagcgagaagagccagtaaaagacgcagtgacggcaatgtctgatgcaatatggacaattggtttcttctctgaatggtgggagtatgaaaagtatggctgaagcgcaaaatgatcccctgctgccgggatacagctttaacgcccatctggtggcgggtttaacgccgattgaggccaacggttatctcgatttttttatcgaccgaccgctgggaatgaaaggttatattctcaatctcaccattcgcggtcagggggtggtgaaaaatcagggacgagaatttgtctgccgaccgggtgatattttgctgttcccgccaggagagattcatcactacggtcgtcatccggaggctcgcgaatggtatcaccagtgggtttactttcgtccgcgcgcctactggcatgaatggcttaactggccgagtatatttgccaatacgggtttctttcgcccggatgaagcgcaccagccgcatttcagcgacctgtttgggcaaatcattaacgccgggcaaggggaagggcgctatagcgagctgctggcgataaatctgcttgagcaattgttactgcggcgcatggaagcgattaacgagagcctccatccaccgatggataatcgggtacgcgaggcttgtcagtacatcagcgatcacctggcagacagcaattttgatatcgccagcgtcgcacagcatgtttgcttgagcccgagccgtctgagtcatcttttccgccagcagttagggattagcgtcttaagctggcgcgaggaccaacgcattagtcaggcgaagctgcttttgagcactacccggatgcctatcgccaccgtcggtcgcaatgttggttttgacgatcaactctatttcagccgagtatttaaaaaatgcaccggggccagcccgagcgagtttcgtgccggttgtgaagaaaaagtgaatgatgtagccgtcaagttgagttaattggtaacgaatcagacaattgacggcttgacggagtagcatagggtttgcagaatccctgcttcgtccatttgacaggcacattatgcaagcattgctggaacactttattacccaatccaccgtgtatagtttgatggcggtggtgttggtggcctttctggagagcctggcgctggtcggtttgattctacccggtacggtgctgatggcggggctgggagcgctgattggcagcggcgagttaagtttctggcacgcctggctggcagggattattggctgcttgatgggcgactggatttctttctggctgggttggcgttttaaaaagccgttgcatcgctggagttttctgaagaaaaacaaagcactacttgataaaactgaacatgcgttgcatcaacacagcatgttcaccattctggtcggtcgttttgttggcccgacgcgtccgctggtgccaatggtggcgggaatgctggatctgccggtggctaaatttattacgccgaatattatcggctgcctgctgtggccgccgttttacttcctgccagggattctggcgggcgcggcgatcgatattcctgccggaatgcagagcggtgagtttaaatggttgctgctggcaacagcggtgtttttgtgggttggtggctggctgtgctggcggttatggcgcagcggtaaagcgactgaccgtttgagtcattatttgtcccgcggtcgtttgttgtggctgacgccgttgatttctgccatcggcgtggtggcgctggtggtgttaattcgccacccgttgatgccggtgtatatcgatattttgcgtaaagtggttggggtttaagagatagtcttgtgcgggttgcctgatgcgacgcttgccgcgtcttatcaggcctacaaaacgcactacccgtaggtcggataaggcgttcacgccgcatccgacagtgcatattaacccgtaatccccaatagtgcgctagcactcgccttaccgctcaacaactcattggtcataccctgccaggcgatgcgcccgtcggcgactactacgctgcgcgtggcgatccgcgccgcatcttccacgctgtggctcaccatcaatagcgtcattttttgctgctggcagctcgtgctcaccagcgtcaacatctcctgacgtaacgccggatcgagcgcagagaacggttcatcgagcaataaaatcggctgttcgcgtaccagacaacgcgctaacgccactcgctgtcgctgaccgccggaaagctcgcccggtaaccgcgccattaaattatcaatccccatctggcgggcgatagcgtgcattttcccctgctgtaccgcgttcagtttcaatcccggatttagccccagcccgatgttctgtgcgaccgtcaggtggctgaacaggttgttctcctgaaacagcatgctcaccggacggcgactcggcggcatagttgtgtgatctacgccatcgatagtcaggctaccgctggctggcgtcagaaaaccggcgatcaaattcagcagggtacttttacccgcgccgcttggcccgaggatcgccacctgctcgccgcgttccaccgttaagctaaaacgcatcggcaaatggtggtaaagccaggtgatatcagtcagttttaacatttcgccccggtagtttttcaatcacggtaaacagcagaaaacagagcagcagcagaattaacgcggtgaccgcaccgtcctggctgcgataggagccaatttgctggtagagataaaacggcagggtgcggaaatcatcgttaccgaacaacgccaccacgccaaaatcaccaatgctcagcacgcatgcaaaggccagcgcctgcgccagtggacgtttcagggcgcgcagctccaccacttttaagcgactccagccttcaatccccaggctctgacataacatgctgtagcgggcggtgatatcgcgcatcgggttttccagcactttcagcgcataagggatcgccattaacgcattggtgaaaatcacaatgccgtcagcagattgtggcaggccgatagtgttgttgagcagtaaaaagaagccggtagccagcacaatccccggcatggcgaggatcaacatgccgctcatctccagcacctgacccgccagcattttctgccgcgcccgcagttcgcgactgctccatagcagcatcatggtcagcactacgcacaatacacctgccgccagcgcaatacgcaagctggtccacagcgcctgccacagcaccggttgtgccagcacttccggcaactggcgatttaccccatcgacgatcaccgccagtaacggtggcagcaacagcagcagcgccagcacaattaacaccgtgtcgcaaatgcggctatgcagacgatcgtccgggtcgcgccagccttgcagcagcgtggtgccgggcgcaatggccttactcaatcgctgactcaacagcaccagcccgaggcagcacaccatctggagcagcgccagcattgccgcgcgggcaggatcgtagtcgtaactcagcgcctgatagattgccagctcgatagtggtcgcctgcggaccgccccccaggcttagcacggtggcgaagctggcgaaacagagcataaagataagcgcagcaaccggcgggatttgtcgccgtaaccacggccattcgacgaagcggaaaaaatgccagctacgcatcccaagctgggcggcaagttgacgctgttcgccggggatgttttccagtgcctggagtaataagcggctcgccatcggcagattaaaaaacacatgggccagcaaaataccttgcaggccgtaggggctaaaggtccactccagaccgaggctttggcagagtgttgccagccagccctggcgaccatagacgctaagaatgccgaaaacagcgaccaacaccgggaggatcaaggtcattgcacacagacgcaacagcgccagccgacccggaaagcgcctgcgatagagcgcgcgggcgaggaatatcgcgggtatgacagagagcagtgcgctgagaaacgcctgccagaaggagaagcgcaccacatgccacagatagctgtcctgccagactgccacccagtcatcctgcggcgcgttccaccacagggcgagaaacgccgccagcgcaaccgctaccaccagcgtggtggcgcttacacctggaattaaccagccgggaattaacggctgacggcgcgttgccattcgctaatccatgcctgacgttgtgccgccacttcggctggcgtgaactccaacgtggttgcgggtttggtcaatttttcaaaaccggcaggcagcgtgacgtttgccaccggatacatccagttgccggttgggatcgcattctggaaagccggagaaaccataaactggaggaatttttgcgccagctccggctgcttgctggcagcggtgcgggcggcgacttccacttgcagatagtgaccttcgctgaagttcgcggcggcgtagttatctttcttctcttcgagaatgtgataagccggagaggtggtgtaactcagtaccagatcgctttcaccttttaaaaacaggccgtaggcttcgctccagcctttggtgaccgtgaccgttttcttcgccagtttctgccaggcttgtggggcgtcatcgccatagactttttgcatccatagcaacagacccagccccggtgtactggtgcgcggatcctgataaatcacccgccagttttgatcgctctcaaccagttctttcaggctttgtggcgggtttttcagtttgttcttgtcataaacgaaggcgaagtagccataatcaaacggtacgaaagtgtcattattccagccgccgggaacgttaacggcatccgctgccacaccgcttttggcaaacagtccggttttactggcggcgtctaacaggttgttatccagccccagcaccacatcggctttactgtttttgccttccatccgtagacggttgagaaggctaacgccatcttccagcgccaccagtttcagttcgcaattacagtcggcttcaaaggcttttttaaccaccggaccaggcccccagtcggcggcgaaggaatcgtaggtataaacagtcagaacgggtttagcgaaaacgggcgctgtgcacagcaacagcaggggcagacatttttttaacactttgcacctcaaaaaagagtggcaaaggacttgagaaggagcctcaaatcccttcgccggcgttatccggatcaggttcgacgggtattttctcagcgcacgcgtacgcgtggcaccccgttgagaacggcgttagtgtagtgattttgttatcaaccagcaatcatggatccggtggcgcaaaccacgcacttttaaaatcgaaccagccgagggtattcatgcgcaggccgcgcatactgcgttgcccctgaatgatcagccagtggtgcaataatggcaccatcgctttgctggcgaccagttgctggcaccagttcgccagattcatctcgccattgcgccagcgagcagcgtcggcttgccagtcaatgggaatgcaatgttgtagcagtggcacttcgcataaatgtgcgaaaacagagaagtccagcggcagggtaaagttggcgctgtttagccagatatcactttcgatctctcctgtatgccactgatcgtagtcgatctctttgattttcagcgtgacctggtgacttgccagaatctgctgcatgatcccggcaatcacccgatgctcactgtgatcctgataaaaggttagggtgaggctttccaggccagccggtttttcgctctttatggtgcgggcatggtgccaacgggggagcagtccataagccgggaaccacagttgctggtactgttcctcagcgaaatagaccagattagttggagaaagcacatagcttacccagtccctgacttgctgattcgccccgcgatgggtgcggctgtcgaacagtaaatagtagcaaccttcctccaggcggctttcaatctctttttcctcgccctgtggaccttttagcatcagccctccggctggctcgtcggcaatttccggcagaacccagacgttaacttcgtcgattaatgcccggtaaccgaagaagtcatcgaatgcctgaattttcagttgattggtgctgttgcgaatcaccgcatacggaccggtgccgatgggatggctggcaaagttactgagggtttcccattcgcgcggcaggatcatcgccggaacttgccccagcagtaacggtaaccagcggtccggttgcgtgagatggatatccagcgtccagggcgtcgggctcacaatgtcagcaatatggctatagagcggcagcgtattgattcgttttaaagaggcgatcacatcgtccatttccagttcacgaccatggtgaaaatggactcctggacgcaaaaagaaacgccagtgaagcggactaatttgctgccagtggtgggcgatgtctgcttccagttccccattttcctcatttatgcgcgttaggctactgaagatttgccgggcgatatgggtttcggaacggcgcaatgcgctgccaggtagcagattacgcaacggacgatagtagagcacgcgcaggatgtgccgcccctggcggaagctgcggcccagatgagaaaccagcatttgccgcacagtcgctttgtcgccaaccaactgcaccagttgatcgatacgatcctgctccagcaggtcttccgcccgctgttgctgaagcgccagcccggtatagaggaatgtcagacggctgcgtttaccgcgcccgacttccgcttcccacgtcagccagccgcgatcctgcatggtgttgagcagggtgcgcatatgacgacggctgcagctcaataacgctgccagttcgttgagcgttgtgtcctggcttttaccctcgcagcattgccacaggcggatgaactgttgttgcagacgagcagatggcataaaaggggaactcctgtgcaaaagacagcaattttattttccctatattaagtcaataattcctaacgatgaagcaagggggtgccccatgcgtcagttttatcagcactattttaccgcgacagcgaagttgtgctggttgcgttggttaagcgtcccacaacgattaaccatgcttgaaggactgatgcagtgggatgaccgcaattctgaaagttgacttgcctgcatcatgtgtgactgagtattggtgtaaaatcacccgccagcagattatacctgctggttttttttattctcgccgcgctaaaaagggaacgtatgatctggataatgacgatggctcgccgtatgaacggtgtttacgcggcatttatgctggtcgcttttatgatgggggtggccggggcgctacaggctcctacattgagcttatttctgagtcgtgaggttggcgcgcaacctttctggatcggcctcttttatacggtgaatgctattgctgggatcggcgtaagcctctggttggcaaaacgttctgacagtcagggcgatcggcgaaaactgattatattttgctgtttgatggctatcggcaatgcgctattgtttgcatttaatcgtcattatctgacgcttatcacctgtggtgtgcttctggcatctctggccaatacggcaatgccacagttatttgctctggcgcgggaatatgcggataacagcgcgcgagaagtggtgatgtttagcagcgtgatgcgtgcgcagctttctctggcatgggttatcggtccaccgttggcctttatgctggcgttgaattacggctttacggtgatgtttagcattgccgccgggatattcacactcagtctggtattgattgcatttatgcttccgtctgtggcgcgggtagaactgccgagcgaaaatgctttaagtatgcaaggtggctggcaggatagtaacgtacggatgttatttgtcgccagcacgttaatgtggacctgcaacaccatgtacattattgatatgccgttgtggatcagtagcgagttaggattgccagacaaactggcgggtttcctgatggggacggcagctggactggaaataccagcaatgattctggctggctactatgtcaaacgttatggtaagcggcgaatgatggtcatagcagtggcggcaggagtactgttttacaccggattgattttctttaatagccgtatggcgttgatgacgctgcaactttttaacgctgtatttatcggcattgttgcgggtattgggatgctatggtttcaggatttaatgcctggaagagcgggggcagctaccaccttatttactaacagtatttctaccggggtaattctggctggcgttattcagggagcaattgcacaaagttgggggcactttgctgtctactgggtaattgcggttatttctgttgtcgcattatttttaaccgcaaaggttaaagacgtttgatgacgtggacgatagcggaaagcccggtcatttgaccgggcaaggggattaattcataaacgcaggttgttttgcttcataagcggcaatggcgtcgtcgtgctgcaaggtaagcccaatactgtccagaccgttcatcatgcagtggcggcggaaggcatcgatggtaaagcgataggttttctctcccgctttcacctcttgcgcttccagatccacgtcgaaatggatccccggattagctttcaccagcgcaaacagttcgtccacttctgcatcgcttaatttcaccggcagcagctggttgttaaagctattgccgtagaagatgtcagcaaaactcggcgcaatcaccactttaaaaccgtagtcggtcaatgcccagggcgcgtgctcacggctagagccacagccgaagttttctcgtgccagcaaaatggaagcgccctgatactgcgggaagttcagcacgaagtccgggtttggctgttggcctttttcatccagaaaacgccagtcgttaaacagatgcgcgccaaaacccgtacgggtcactttctgcaaaaactgtttcgggatgattgcatcggtatcgacattggcggcatccagcggaaccaccaggcctgtgtgtttgataaatttctctgccatggtgtgctccttatttaatgttgcgaatgtcggcgaaatgtccggtcacagcagcagcggcagccattgccgggctgaccagatgcgtgcgcccgccgcgcccctggcggccttcaaagttacggttgctggtggaggcacaacgttcgcccggattcagacggtcgttgttcatcgccagacacatactgcagccaggcaagcgccattcaaaaccggcttcaataaagattttatccagaccttccgcttccgcctgggcttttaccgggccagagccgggaaccaccagtgcctgcacgcctggcgcgacttttcgccctttggcgatctccgctgccgcgcgtaaatcttcaatgcggctgttggtacaggaaccgataaacactttgtcgatagccacttcggtcagcggaatacccggtttcagccccatataggccagcgctttttctgcgctcgcgcgttcaaccggatcggcaaagctagccggatcgggaatattgtcgttcacggaaatcacctggccgggattggtgccccaggtgacctgcggactaatttcttctgcttgcagagtgacaacggtatcgaaagttgcgccttcgtcggtttgcagggttttccagtaggcaacggcgtcgtcgaaatctttgcctttcggcgcatgcagacggcctttgacatagttaaaggtggtttcgtccggtgcaaccagaccggcttttgcgcccatttcgattgccatattgcacagggtcatacgaccttccatgcttaaatcacggattgcttcgccgcaaaactccaccacatgcccggtgccgcctgcgctaccggttttaccgataattgccagcacgatatcttttgcggtaatgcccggcgcggctttgccctggacttcaattttcatggtttttgcgcggccctgtttcagggtttgcgttgccagtacgtgttcaacttcggaagtgccgataccaaaggccagtgcgccaaacgcgccgtgggtggcggtatggctgtcgccgcagacaatggtcatccccggcaaggtgacgccctgttccggccccattacgtggacgatcccctgatacgggtgattcaggtcatacagttcgacgccaaattctttgcagtttttgatcagttcctgcatctggatacgcgccatttcaccgcaggcattaatgtctttggtctgggtagagacgttgtgatccatggtagcgaaggttttgcccggctgacgtaccgggcgaccgtgggcgcgcagaccatcgaacgcctgcggactggtcacttcatgcaccaggtggcggtcgatatataacagtggggtttcgttttcggcttcgtacacaacgtgagcgtcgaacaatttttcgtataacgtcttagccatgattacaccccttctgctacatagcgggcaatgatatcgcccatttcatcggtactaacggcggcagcgccacgggctaaatccccggtgcgaatgccttcttctaatgcgcggttaatggcgcgttcaatggcgcaagccgcatcatcggcatccaggctgtaacgcagcagcagtgccaggctaaggatttgtgcaatcgggttggcgatgtttttgcctgcgatatctggtgcgctgccgcccgccggttcatacagtccaaaaccttgctcgttcaggctggcggaaggcaacatccccatgctgccagtgatcattgcgcactcgtcagacagaatgtcgccaaacaggttggagcacagcagaacgtcaaactgacttggatctttaatcagctgcatggtggcgttgtcgatgtacatatgcgccagttcgacatccgggtattccgtggcgatctcgttaacgatctcccgccataaaatagaggattgcagcacgttggctttatcgatgctcgtcactttgtggcgacgcttgcgagcagattcaaacgcgatgcgggcgatacgttcgatctcaaaacggtgatacacctcggtatcaaaggctttttcatattgtccgctaccttcgcggccttttggctgaccgaaatagatgccgccggtcagttcgcgcacacacaggatgtcgaagccgtttgcggcaatgtctgcacgcagcggacagaatgcttccagcccctgatacagttttgccgggcgcaggttgctgaataatttgaagtgcttacgcagaggcagcagcgcgccgcgttctggttgctggtctggtggtaaatgttcccacttcgggccgcctacgctgccaaacagcacggcatcggcttgctcacaaccttcaaccgtcgcaggcggcagtggttgcccgtggttatcaatggctgcgccgcctacatcgtaatggctggtggtgatgcgcatcgcaaagcggttgcgcacggcatccagcactttcagcgcctgggtcatcacttccggaccaataccgtcccccggcaatacggcaatatggtaattcttgctcatcacacggtttccttgttgttttcgttgtgttgagctttgcgttgcaactctttttcgacttctgcggcacgccagatattgttcagaacgtgcaccatggctttggcagaactctcgacaatatcggtagccaggccgacgccgtggaagcggcgaccgttgtagttagcgacgatatccacctgacccagcgcatctttaccgtggcctttggcggtcaggctgtatttcaccagttcgacgttatattcagtgatgcggttaattgcctgatagacggcatcgaccggaccgttaccgttggcggcttctgctttgacttcttcgccacaggccagtttgacggcggcggtggcgatatcgttagagccagactgcacgctgaagtaatccagacggaaatgctccggctcttcttgctgcttaccgatgaaggccagcgcctccagatcgtaatcaaacacctgaccttttttgtccgccagcttcaggaaagcatcgtacaaattgtctaaattatattcactttctttataccccatctcatccatgcgatgtttcaccgccgcacgcccgctacgagaggtcagattcagctggatttggttcagaccaatagattctggtgtcatgatttcgtagttttcgcggtttttcagcacgccatcctggtgtataccggaggagtgtgcgaatgcgccgctgccaacaatggctttgtttgccgggatcggcatattacaaatctggctaactaactggctggtgcgccatatctcctggtgattaatggcggtgtggacgttgagaatatccttacgaactttgatcgccatgatgacttcttccagggaacagtttccggcacgctcgccgatcccgttcattgcgccttccacctggcgtgcaccggcatgtaccgccgccagactgtttccgaccgccaggcccaaatcgtcgtgggtatgtacggagataatggctttgtcgatgttaggcacgcgttcatacaggccgctgatgattccggcgaactcaaacggcatggtgtagcccacggtgtccggaatgttgatggtggtggcaccggcattaatcgccgcttcgaccactcgcgccagatcggcaatgggtgtacgcccggcatcttcgcaagaaaattcaacatcatcggtgtaattacgggcgcgtttcaccatatagatagcgcgttcgatcacctcgtccagcgtgctgcgcagcttggtggcgatgtgcattgggctagtggcaataaaggtatgaatacggaaggcttcggcgactttcagggattcggccgccacgtcgatatctttttccacgcagcgagctaacgcacatacgcggctgtttttaacctggcgggcgatggtttgcacgctttcaaaatcgcccgggctagagacggggaaaccgacttccatcacgtcaacacccatacgctcaagggccagcgcaatttgcagtttttctttcacactcaagcttgcctgtaacgcctgttcaccgtcgcgcaatgtggtatcgaaaataatgacttgctggctcatggtttgggtccttgtctcttttagagcgcctcgcttcgggcataaaaaaacccgcgcaatggcgcgggttttttgtttgactgcgtgctggcttaatgctggatgccgctcactcgtctaccgcgcaaagaagatgcgtttagtagtagtagaccgataaagcgaacgatgtgagtcattaaatcagctccagatgaatgcgatatgcttttagagttactggatacaaaaacggatgtcaaccctgacgcaataaaaacgtcccgccagcgtgagttctgcatccgtaaaattagctaattgtgctgcggtggttaaagtaagcgatattaatttctgcttaactaccgacgcttttcatcggttgacatatttcagcataaatttttgcatctaatcaacgaggaaaaaggggacaaaatgcacgcgttgcaaaacctatcctgatgatttgtattgaattatatgttttgcgattttttttgatattgatttggtgaatattattgatcaattaatgttaagaattaatgcattaaatatataaattaattattaaataagcacatttaatccattttgtagatgattgagtattcgcggtagttatgattagattgttttcgcaacaaaaacattatggattattatgctgtggtaaatgactcattccacggcaatggattctgtttttatcagaacccgtatctttatgttttccgaattttactcattttgctttttcttattttatatgcatgataaatcatattcttcaggattatttctctgcattccaataagggaaagggagttaagtgtgacagtggagttaagtatgccagaggtacaaacagatcatccagagacggcggagttaagcaaaccacagctacgcatggtcgatctcaacttattaaccgttttcgatgccgtgatgcaggagcaaaacattactcgtgccgctcatgttctgggaatgagccaacctgcggtcagtaacgctgttgcacgcctgaaggtgatgtttaatgacgagctttttgttcgttatggccgtggtattcaaccgactgctcgcgcatttcaactttttggtagtgttcgtcaggcattgcaactagtacaaaatgaattgcctggtagtggttttgaacccgcgagcagtgaacgtgtatttcatctttgtgtttgcagcccgttagacagcattctgaccagccagatttataatcacattgagcagattgcgccaaatatacatgttatgttcaagtctagtttaaatcagaacactgaacatcagctgcgttatcaggaaacggagtttgtgattagttatgaagacttccatcgtcctgaatttaccagcgtaccattatttaaagatgaaatggtgctggtagccagcaaaaatcatccaacaattaagggcccgttactgaaacatgatgtttataacgaacaacatgcggcggttagcctcgatcgtttcgcgagttttagtcaaccttggtatgacacggtagataagcaagccagtatcgcgtatcagggcatggcaatgatgagcgtacttagcgtggtgagccaaacgcatttggtcgctattgcgccgcgttggctggctgaagagttcgctgaatccttagaattacaggtattaccgctgccgttaaaacaaaacagcagaacctgttatctctcctggcatgaagctgccgggcgcgataaaggccatcagtggatggaagagcaattagtcagtatttgcaaacgctaactgattgcagaataggtcagacatgaatgtctggtttattctgcattttttattgaatgtagaattttattctgaatgtgtgggctctctattttaggattaattaaaaaaatagagaaattgctgtaagttgtgggattcagccgatttattatcaatttaatcctctgtaatggaggattttatcgtttcttttcacctttcctcctgtttattcttattaccccgtgtttatgtctctggctgccaattgcttaagcaagatcggacggttaatgtgttttacacattttttccgtcaaacagtgaggcaggccatggagatgttgtctggagccgagatggtcgtccgaagccttatcgatcagggcgttaaacaagtattcggttatcccggaggcgcagtccttgatatttatgatgcattgcataccgtgggtggtattgatcatgtattagttcgtcatgagcaggcggcggtgcatatggccgatggcctggcgcgcgcgaccggggaagtcggcgtcgtgctggtaacgagcggtccaggggcgaccaatgcgattactggcatcgccaccgcttatatggattccattccattagttgtcctttccgggcaggtagcgaccagcttgataggttacgatgcctttcaggagtgcgacatggtggggattagccgaccggtggttaaacacagttttctggttaagcaaacggaagacattccgcaggtgctgaaaaaggctttctggctggcggcaagtggtcgcccaggaccagtagtcgttgatttaccgaaagatattcttaatccggcgaacaaattaccctatgtctggccggagagcgtcagtatgcgttcttacaatcccactactaccggacataaagggcaaattaagcgtgctctgcaaacgctggtagcggcaaaaaaaccggttgtctacgtaggcggtggggcaatcacggcgggctgccatcagcagttgaaagaaacggtggaggcgttgaatctgcccgttgtttgcagtttgatggggctgggggcgtttccggcaacgcatcgtcaggcactgggcatgctgggaatgcacggtacctacgaagccaatatgacgatgcataacgcggatgtgattttcgccgtcggggtacgatttgatgaccgaacgacgaacaatctggcaaagtactgcccaaatgccactgttctgcatatcgatattgatcctacttccatttctaaaaccgtgactgcggatatcccgattgtgggggatgctcgccaggtcctcgaacaaatgcttgaactcttgagccaagaatccgcccatcaaccactggatgagatccgcgactggtggcagcaaattgaacagtggcgcgctcgtcagtgcctgaaatatgacactcacagtgaaaagattaaaccgcaggcggtgatcgagactctttggcggttgacgaagggagacgcttacgtgacgtccgatgtcgggcagcaccagatgtttgctgcactttattatccattcgacaaaccgcgtcgctggatcaattccggtggcctcggcacgatgggttttggtttacctgcggcactgggcgtcaaaatggcgttgccagaagaaaccgtggtttgcgtcactggcgacggcagtattcagatgaacatccaggaactgtctaccgcgttgcaatacgagttgcccgtactggtggtgaatctcaataaccgctatctggggatggtgaagcagtggcaggacatgatctattccggccgtcatagtcaatcttatatgcaaagcctacccgatttcgtccgtctggcggaagcctatgggcatgtcgggatccagatttctcatccgcatgagctggaaagcaaacttagcgaggcgctggaacaggtgcgcaataatcgcctggtgtttgttgatgttaccgtcgatggcagcgagcacgtctacccgatgcagattcgcgggggcggaatggatgaaatgtggttaagcaaaacggagagaacctgattatgcgccggatattaagtgtcttactcgaaaatgaaagtggcgcgttatcccgcgtgattggccttttttcccagcgtggctacaacattgaaagcctgaccgttgcgccaaccgacgatccgacattaagccgtatgaccatccagaccgtgggcgatgaaaaagtacttgagcagatcgaaaagcaattacacaaactggtcgatgtcttgcgcgtgagtgagttggggcagggcgcgcatgttgagcgggaaatcatgctggtgaaaattcaggccagcggttacgggcgtgacgaagtgaaacgtaatacggaaatattccgtgggcaaattatcgatgtcacacccagcctttataccgttcaattagcaggcaccagcggtaagcttgatgcatttttagcaagcattcgcgatgtggcgaaaattgtggaggttgctcgctctggtgtggtcggacttagccgcggcgataaaataatgcgttgagaatgatctcaatgcgcaatttacagcccaacatgtcacgttgggctttttttgcgaaatcagtgggaacctggaataaaagcagttgccgcagttaattttctgcgcttagatgttaatgaatttaacccataccagtacaatggctatggtttttacattttacgcaaggggcaattgtgaaactggatgaaatcgctcggctggcgggagtgagccggaccactgcaagctatgttattaacggcaaagcgaagcaataccgtgtgagcgacaaaaccgttgaaaaagtcatggctgtggtgcgtgagcacaattaccacccgaacgccgtggcagctgggcttcgtgctggacgcacacgttctattggtcttgtgatccccgatctggagaacaccagctatacccgcatcgctaactatcttgaacgccaggcgcggcaacggggttatcaactgctgattgcctgcagtgaagatcagccagacaacgaaatgcggtgcattgagcaccttttacagcgtcaggttgatgccattattgttagcacgagcttgcctcctgagcatcctttttatcaacgctgggctaacgacccgttcccgattgtcgcgctggaccgcgccctcgatcgtgaacacttcaccagcgtggttggtgccgatcaggatgatgccgaaatgctggcggaagagttacgtaagtttcccgccgagacggtgctttatcttggtgcgctaccggagctttctgtcagcttcctgcgtgaacaaggtttccgtactgcctggaaagatgatccgcgcgaagtgcatttcctgtatgccaacagctatgagcgggaggcggctgcccagttattcgaaaaatggctggaaacgcatccgatgccgcaggcgctgttcacaacgagctttgcgttgttgcaaggagtgatggatgtcacgctgcgtcgcgacggcaaactgccttctgacctggcaattgccacctttggcgataacgaactgctcgacttcttacagtgtccggtgctggcagtggctcaacgtcaccgcgatgtcgcagagcgtgtgctggagattgtcctggcaagcctggacgaaccgcgtaagccaaaacctggtttaacgcgcattaaacgtaatctctatcgccgcggcgtgctcagccgtagctaagccgcgaacaaaaatacgcgccaggtgaatttccctctggcgcgtagagtacgggactggacatcaatatgcttaaagtaaataagactattcctgactattattgataaatgcttttaaacccgcccgttaattaactcaccagctgaaattcacaataattaagtgatatcgacagcgcgtttttgcattattttgttacatgcggcgatgaattgccgatttaacaaacacttttctttgcttttgcgcaaacccgctggcatcaagcgccacacagacgtaacaaggactgttaaccggggaagatatgtcctaaaatgccgctcgcgtcgcaaactgacactttatatttgctgtggaaaatagtgagtcattttaaaacggtgatgacgatgagggattttttcttacagctattcataacgttaatttgcttcgcacgttggacgtaaaataaacaacgctgatattagccgtaaacatcgggttttttacctcggtatgccttgtgactggcttgacaagcttttcctcagctccgtaaactcctttcagtgggaaattgtggggcaaagtgggaataaggggtgaggctggcatgttccggggagcaacgttagtcaatctcgacagcaaagggcgcttaagtgtgcctacccgttatcgggaacagctgcttgagaacgctgccggtcaaatggtttgcaccattgacatttatcacccgtgcctgctgctttaccccctgcctgaatgggaaattatcgagcaaaaattaagccgtctgagcagcatgaacccggttgagcgccgtgtgcagcgcctactgttaggtcatgccagcgaatgtcagatggatggcgcaggtcgattgttaatcgcgccagtactgcggcaacatgccgggctgacaaaagaagtgatgctggttggacagttcaacaagtttgagctgtgggatgaaacaacctggcatcaacaggtcaaggaagatatcgacgcagagcagttggctaccggagacttaagcgagcgactgcaggacttgtctctataaaatgatggaaaactataaacatactacggtgctgctggatgaagccgttaatggcctcaatatccgtcctgatggcatctacattgatgggacttttggtcgcggtggtcacagtcgtctgatcctcagccagcttggcgaagaggggcgtttgctggcgatcgatcgcgacccgcaggctatcgccgttgcgaagactattgatgatccgcgcttctccatcatccacggacctttctccgcgctgggcgaatacgttgccgagcgcgatcttatcggcaagatcgacggcattctcctcgatcttggcgtctctagtccgcaacttgatgatgctgaacgtggcttttcctttatgcgcgatggtccgctggacatgcgtatggacccaacccgtgggcagagtgccgctgaatggctacaaaccgcagaagaagccgatatcgcctgggtattgaaaacctatggtgaagagcgttttgccaaacgcattgcccgcgccattgtcgagcgtaaccgcgaacagccgatgacccgcaccaaagaactggcggaagtcgtggctgctgcaacgccggtgaaagataagtttaaacatcccgcgacccgtaccttccaggcggtgcgcatttgggtaaacagtgaactggaggagatagagcaggcgctaaaaagcagcctcaacgtgctggccccgggtgggcggcttagcatcatcagcttccacagcctggaagaccgtattgtgaaacgttttatgcgtgaaaacagccgcggtccgcaagttccggcagggttaccgatgactgaagagcagctcaaaaaactgggtggccgtcagctgcgagcactaggcaagttaatgccgggcgaagaagaggtggctgagaaccctcgtgcccgtagtagtgttctgcgtattgcagagaggacgaatgcatgatcagcagagtgacagaagctctaagcaaagttaaaggaagcatgggaagccacgagcgccatgcattgcctggtgttatcggtgacgatcttttgcgatttgggaagctgccactctgcctgttcatttgcattattttgacggcggtgactgtggtaaccacggcgcaccatacccgtttactgaccgctcagcgcgaacaactggtgctggagcgagatgctttagacattgaatggcgcaacctgatccttgaagagaatgcgctcggcgaccatagccgggtggaaaggatcgccacggaaaagctgcaaatgcagcatgttgatccgagtcaagaaaatatcgtagtgcaaaaataaggataaacgcgacgcatgaaagcagcggcgaaaacgcagaaaccaaaacgtcaggaagaacatgccaactttatcagttggcgttttgcgttgttatgcggctgtattctcctggcgctggcttttctgctcggacgcgtagcgtggttacaagttatctccccggatatgctggtgaaagagggcgacatgcgttctcttcgcgttcagcaagtttccacctcccgcggcatgattactgaccgttctggtcgcccgttagcggtgagcgtgccggtaaaagcgatttgggctgacccgaaagaagtgcatgacgctggcggtatcagcgtcggtgaccgctggaaggcgctggctaacgcgctcaatattccgctggatcagcttagtgcccgcattaacgccaacccgaaagggcgctttatttatctggcgcgtcaggtgaaccctgacatggcggactacatcaaaaaactgaaactgccggggattcatctgcgtgaagagtctcgccgttactatccgtccggcgaagtgactgctcacctcatcggctttactaacgtcgatagtcaagggattgagggcgttgagaagagtttcgataaatggcttaccgggcagccgggtgagcgcattgtgcgtaaagaccgctatggtcgcgtaattgaagatatttcttctactgacagccaggcagcgcacaacctggcgctgagtattgatgaacgcctgcaggcgctggtttatcgcgaactgaacaacgcggtggcctttaacaaggctgaatctggtagcgccgtgctggtggatgtcaacaccggtgaagtgctggcgatggctaacagcccgagttacaaccctaacaatctgagcggcacgccgaaagaggcgatgcgtaaccgtaccatcaccgacgtgtttgaaccgggcagtacggttaaaccgatggtggtaatgaccgcgttgcaacgtggcgtggtgcgggaaaacagcgtactcaataccattccttatcgaattaacggccacgaaatcaaagacgtggcacgctacagcgaattaaccctgaccggggtattacagaagagcagtaacgtcggtgtttccaagctggcgttagcgatgccgtccagtgcgttagtagatacttacagtcgttttggactgggaaaagcgaccaatttggggttggtcggagaacgcagtggcttatatcctcaaaaacaacggtggtctgacatagagagggccaccttctctttcggctacgggctaatggtaacaccattacagttagcgcgagtctacgcaactatcggcagctacggcatttatcgcccactgagcattaccaaagttgaccccccggttcccggtgaacgtgtcttcccggaatccattgtccgcactgtggtgcatatgatggaaagcgtggcgctaccaggcggcggcggcgtgaaggcggcgattaaaggctatcgtatcgccattaaaaccggtaccgcgaaaaaggtcgggccggacggtcgctacatcaataaatatattgcttataccgcaggcgttgcgcctgcgagtcagccgcgcttcgcgctggttgttgttatcaacgatccgcaggcgggtaaatactacggcggcgccgtttccgcgccggtctttggtgccatcatgggcggcgtattgcgtaccatgaacatcgagccggatgcgctgacaacgggcgataaaaatgaatttgtgattaatcaaggcgaggggacaggtggcagaagctaaagcctgagcgcttcgcgctggttgttgttatcaacgatccgcaggcgggtaaatactacggcggcgccgtttccgcgccggtctttggtgccatcatgggcggcgtattgcgtaccatgaacatcgagccggatgcgctgacaacgggcgataaaaatgaatttgtgattaatcaaggcgaggggacaggtggcagatcgtaatttgcgcgaccttcttgctccgtgggtgccagacgcacctagccgagcactgcgagagatgacactcgacagccgtgtggctgcggcgggcgatctctttgtagctgtagtaggtcatcaggcggacgggcgtcgatatatcccgcaggcgatagcgcaaggtgtggctgccattattgcagaggcgaaagatgaggcgaccgatggtgaaatccgtgaaatgcacggcgtaccggtcatctatctcagccagctcaacgagcgtttatctgcactggcgggccgcttttaccatgaaccctctgacaatttacgtctcgtgggcgtaacgggcaccaacggcaaaaccacgactacccagctgttggcgcagtggagccaactgcttggcgaaatcagcgcggtaatgggcaccgttggtaacggcctgctggggaaagtgatcccgacagaaaatacaaccggtagcgcagtcgatgttcagcatgagctggcggggctggtggatcagggcgcgacgttttgcgcaatggaagtttcctcccacgggctggtacagcaccgtgtggcggcattgaaatttgcggcgagcgtctttaccaacttaagccgcgatcaccttgattatcatggtgatatggaacactacgaagccgcgaaatggctgctttattctgagcatcattgcggtcaggcgattattaacgccgacgatgaagtgggccgccgctggctggcaaaactgccggacgcggttgcggtaagtatggaagatcatattaatccgaactgtcacggacgctggttgaaagcgaccgaagtgaactatcacgacagcggtgcgacgattcgctttagcagtagttggggcgatggcgaaattgaaagccatctgatgggcgcttttaacgtcagcaacctgctgctcgcgctggcgacactgttggcactcggctatccactggctgatctgctgaaaaccgccgcgcgtctgcaaccggtttgcggacgtatggaagtgttcactgcgccaggcaaaccgacggtggtggtggattacgcgcatacgccggatgcactggaaaaagccttacaggcggcgcgtctgcactgtgcgggcaagctgtggtgtgtctttggctgtggtggcgatcgcgataaaggtaagcgtccactgatgggcgcaattgccgaagagtttgctgacgtggcggtggtgacggacgataacccgcgtaccgaagaaccgcgtgccatcatcaacgatattctggcgggaatgttagatgccggacatgccaaagtgatggaaggccgtgctgaagcggtgacttgcgccgttatgcaggctaaagagaatgatgtggtactggtcgcgggcaaaggccatgaagattaccagattgttggcaatcagcgtctggactactccgatcgcgtcacggtggcgcgtctgctgggggtgattgcatgattagcgtaacccttagccaacttaccgacattctcaacggtgaactgcaaggtgcagatatcacccttgatgctgtaaccactgatacccgaaaactgacgccgggctgcctgtttgttgccctgaaaggcgaacgttttgatgcccacgattttgccgaccaggcgaaagctggcggcgcaggcgcactactggttagccgtccgctggacatcgacctgccgcagttaatcgtcaaggatacgcgtctggcgtttggtgaactggctgcatgggttcgccagcaagttccggcgcgcgtggttgctctgacggggtcctccggcaaaacctccgttaaagagatgacggcggcgattttaagccagtgcggcaacacgctttatacggcaggcaatctcaacaacgacatcggtgtaccgatgacgctgttgcgcttaacgccggaatacgattacgcagttattgaacttggcgcgaaccatcagggcgaaatagcctggactgtgagtctgactcgcccggaagctgcgctggtcaacaacctggcagcggcgcatctggaaggttttggcagccttgcgggtgtcgcgaaagcgaaaggtgaaatctttagcggcctgccggaaaacggtatcgccattatgaacgccgacaacaacgactggctgaactggcagagcgtaattggcagtcgcaaagtgtggcgtttcagtcccaatgccgccaacagcgatttcaccgccaccaatatccatgtgaccagccacggtacggaatttaccctacaaaccccaaccggtagcgtcgatgttctgctgccgttgccggggcgtcacaatattgcgaatgcgctggcagccgctgcgctctccatgtccgtgggcgcaacgcttgatgctatcaaagcggggctggcaaatctgaaagctgttccaggccgtctgttccccatccaactggcagaaaaccagttgctgctcgacgactcctacaacgccaatgtcggtagtatgactgcagcagtccaggtactggctgaaatgccgggctaccgcgtgctggtggtgggcgatatggcggaactgggcgctgaaagcgaagcctgccatgtacaggtgggcgaggcggcaaaagctgctggtattgaccgcgtgttaagcgtgggtaaacaaagccatgctatcagcaccgccagcggcgttggcgaacattttgctgataaaactgcgttaattacgcgtcttaaattactgattgctgagcaacaggtaattacgattttagttaagggtagtcgtagtgccgccatggaagaggtagtacgcgctttacaggagaatgggacatgttaatataagctttacaggagaatgggacatgttagtttggctggccgaacatttggtcaaatattattccggctttaacgtcttttcctatctgacgtttcgcgccatcgtcagcctgctgaccgcgctgttcatcagtttgtggatgggcccgcgtatgattgctcatttgcaaaaactttcctttggtcaggtggtgcgtaacgacggtcctgaaagtcacttcagcaagcgcggtacgccgaccatgggcgggattatgatcctgacggcgattgtgatctccgtactgctgtgggcttacccgtccaatccgtacgtctggtgcgtgttggtggtgctggtaggttacggtgttattggctttgttgatgattatcgcaaagtggtgcgtaaagacaccaaagggttgatcgctcgttggaagtatttctggatgagcgtcattgcgctgggtgtcgccttcgccctgtaccttgccggcaaagacacgcccgcaacgcagctggtggtcccattctttaaagatgtgatgccgcagctggggctgttctacattctgctggcttacttcgtcattgtgggtactggcaacgcggtaaacctgaccgatggtctcgacggcctggcaattatgccgaccgtatttgtcgccggtggttttgcgctggtggcgtgggcgaccggcaatatgaactttgccagctacttgcatataccgtatctgcgacacgccggggaactggttattgtctgtaccgcgatagtcggggcaggactgggcttcctgtggtttaacacctatccggcgcaggtctttatgggcgatgtaggtagcctggcgttaggtggtgcgttaggcattatcgccgtactgctacgtcaggaattcctgctggtgattatggggggcgtgttcgtggtagaaacgctttctgtcatcctgcaggtcggctcctttaaactgcgcggacaacgtattttccgcatggcaccgattcatcaccactatgaactgaaaggctggccggaaccgcgcgtcattgtgcgtttctggattattagcctgatgctggttctgattggtctggcaacgctgaaggtacgttaatcatggctgattatcagggtaaaaatgtcgtcattatcggcctgggcctcaccgggctttcctgcgtggactttttcctcgctcgcggtgtgacgccgcgcgttatggatacgcgtatgacaccgcctggcctggataaattacccgaagccgtagaacgccacacgggcagtctgaatgatgaatggctgatggcggcagatctgattgtcgccagtcccggtattgcactggcgcatccatccttaagcgctgccgctgatgccggaatcgaaatcgttggcgatatcgagctgttctgtcgcgaagcacaagcaccgattgtggcgattaccggttctaacggcaaaagcacggtcaccacgctagtgggtgaaatggcgaaagcggcgggggttaacgttggtgtgggtggcaatattggcctgcctgcgttgatgctactggatgatgagtgtgaactgtacgtgctggaactgagcagcttccagctggaaaccacctccagcttacaggcggtagcagcgaccattctgaacgtgactgaagatcatatggatcgctatccgtttggtttacaacagtatcgtgcagcaaaactgcgcatttacgaaaacgcgaaagtttgcgtggttaatgctgatgatgccttaacaatgccgattcgcggtgcggatgaacgctgcgtcagctttggcgtcaacatgggtgactatcacctgaatcatcagcagggcgaaacctggctgcgggttaaaggcgagaaagtgctgaatgtgaaagagatgaaactttccgggcagcataactacaccaatgcgctggcggcgctggcgctggcagatgctgcagggttaccgcgtgccagcagcctgaaagcgttaaccacattcactggtctgccgcatcgctttgaagttgtgctggagcataacggcgtacgttggattaacgatagcaaagcgaccaacgtcggcagtacggaagcggcgctgaatggcctgcacgtagacggcacactgcatttgttgctgggtggcgatggtaaaagcgcggactttagcccactggcgcgttacctgaatggcgataacgtacgtctgtattgtttcggtcgtgacggcgcgcagctggcggcgctacgtccggaagtggcagaacaaaccgaaactatggaacaggcgatgcgcttgctggctccgcgtgttcagccgggcgatatggttctgctctccccagcctgtgccagccttgatcagttcaagaactttgaacaacgaggcaatgagtttgcccgtctggcgaaggagttaggttgatgcgtttatctctccctcgcctgaaaatgccgcgcctgccaggattcagtatcctggtctggatctccacggcgctaaagggctgggtgatgggcagccgggaaaaagataccgacagcctgatcatgtacgatcgcaccttactgtggctgaccttcggcctcgcggcgattggctttatcatggtgaccagcgcgagtatgcccatagggcaacgcttaaccaacgatccgttcttcttcgcgaagcgtgatggtgtctatctgattttggcgtttattctggcgatcattacgctgcgtctgccgatggagttctggcaacgctacagtgccacgatgctgctcggatctatcatcctgctgatgatcgtcctggtagtgggtagcagcgttaaaggggcaagccgttggatcgatctcggtttgctgcgtatccagcctgcggagctgacaaaactgagcctgttttgctatatcgccaactatctggtgcgtaaaggcgacgaagtacgtaataacctgcgcggcttcctgaaaccgatgggcgtgattctggtgttggcagtgttactgctggcacagccagaccttggtacggtggtggtgttgtttgtgactacgctggcgatgttgttcctggcgggagcgaaattgtggcagttcattgccattatcggtatgggcattagtgcggttgtgttgctgatactcgccgaaccgtaccgtatccgccgtgttaccgcattctggaacccgtgggaagatccctttggcagcggctatcagttaacgcaaagcctgatggcgtttggtcgcggcgaactttgggggcaaggtttaggtaacagcgtacaaaaactggagtatctgccggaagcgcacactgactttattttcgccattatcggcgaagaactggggtatgtcggtgtggtgctggcacttttaatggtattcttcgtcgcttttcgcgcgatgagcattggccgtaaagcattagaaattgaccaccgtttttccggttttctcgcctgttctattggcatctggtttagcttccaggcgctggttaacgtaggcgcggcggcggggatgttaccgaccaaaggtctgacattgccgctgatcagttacggtggtagcagcttactgattatgagcacagccatcatgatgctgttgcgtattgattatgaaacgcgtctggagaaagcgcaggcgtttgtacgaggtagtcgatgagtggtcaaggaaagcgattaatggtgatggcaggcggaaccggtggacatgtattcccgggactggcggttgcgcaccatctaatggctcagggttggcaagttcgctggctggggactgccgaccgtatggaagcggacttagtgccaaaacatggcatcgaaattgatttcattcgtatctctggtctgcgtggaaaaggtataaaagcactgatagctgccccgctgcgtatcttcaacgcctggcgtcaggcgcgggcgattatgaaagcgtacaaacctgacgtggtgctcggtatgggaggctacgtgagtggtccaggtggtctggccgcgtggagcttaggcattccggttgtacttcatgaacaaaacggtattgcgggcttaaccaataaatggctggcgaagattgccaccaaagtgatgcaggcgtttccaggtgctttccctaatgcggaagtagtgggtaacccggtgcgtaccgatgtgttggcgctgccgttgccgcagcaacgtttggctggacgtgaaggtccggttcgtgtgctggtagtgggtggttctcagggcgcacgcattcttaaccagacaatgccgcaggttgctgcgaaactgggtgatagtgtcactatctggcatcagagcggcaaaggtagccaacaatccgttgaacaggcgtatgccgaagcggggcaaccgcagcataaagtgacggaatttattgatgatatggcggcggcgtatgcgtgggcggatgtcgtcgtttgccgctccggtgcgttaacggtgagtgaaatcgccgcggcaggactaccggcgttgtttgtgccgtttcaacataaagaccgccagcaatactggaatgcgctaccgctggaaaaagcgggcgcagccaaaattatcgagcagccacagcttagcgtggatgctgtcgccaacaccctggccgggtggagccgagaaaccttattaaccatggcagaacgcgcccgcgctgcatccattccggatgccaccgagcgagtggcaaatgaagtgagccgggttgcccgggcgtaattgtagcgatgccttttgcatcgtatgaatttaagaagttaatggcgtaaagaatgaatacacaacaattggcaaaactgcgttccatcgtgcccgaaatgcgtcgcgttcggcacatacattttgtcggcattggtggtgccggtatgggcggtattgccgaagttctggccaatgaaggttatcagatcagtggttccgatttagcgccaaatccggtcacgcagcagttaatgaatctgggtgcgacgatttatttcaaccatcgcccggaaaacgtacgtgatgccagcgtggtcgttgtttccagcgcgatttctgccgataacccggaaattgtcgccgctcatgaagcgcgtattccggtgatccgtcgtgccgaaatgctggctgagttaatgcgttttcgtcatggcatcgccattgccggaacgcacggcaaaacgacaaccaccgcgatggtttccagcatctacgcagaagcggggctcgacccaaccttcgttaacggcgggctggtaaaagcggcgggggttcatgcgcgtttggggcatggtcggtacctgattgccgaagcagatgagagtgatgcaagcttcctgcatctgcaaccgatggtggcgattgtcaccaatatcgaagccgaccacatggatacctaccagggcgactttgagaatttaaaacagacttttattaattttctgcacaacctgccgttttacggtcgtgcggtgatgtgtgttgatgatccggtgatccgcgaattgttaccgcgagtggggcgtcagaccacgacttacggcttcagcgaagatgccgacgtgcgtgtagaagattatcagcagattggcccgcaggggcactttacgctgctgcgccaggacaaagagccgatgcgcgtcaccctgaatgcgccaggtcgtcataacgcgctgaacgccgcagctgcggttgcggttgctacggaagagggcattgacgacgaggctattttgcgggcgcttgaaagcttccaggggactggtcgccgttttgatttcctcggtgaattcccgctggagccagtgaatggtaaaagcggtacggcaatgctggtcgatgactacggccaccacccgacggaagtggacgccaccattaaagcggcgcgcgcaggctggccggataaaaacctggtaatgctgtttcagccgcaccgttttacccgtacgcgcgacctgtatgatgatttcgccaatgtgctgacgcaggttgataccctgttgatgctggaagtgtatccggctggcgaagcgccaattccgggagcggacagccgtagcctgtgtcgcacaattcgtggacgtgggaaaattgatcccattctggtgccggatccggcgcgggtagccgagatgctggcaccggtattaaccggtaacgacctgattctcgttcagggggctggtaatattggaaaaattgcccgttctttagctgaaatcaaactgaagccgcaaactccggaggaagaacaacatgactgataaaatcgcggtcctgttgggtgggacctccgctgagcgggaagtttctctgaattctggcgcagcggtgttagccggactgcgtgaaggcggtattgacgcgtatcctgtcgacccgaaagaagtcgacgtgacgcaactgaagagcatgggctttcagaaagtgtttatcgcgctacacggtcgcggcggtgaagatggtacgctgcaggggatgctcgagctgatgggcttgccttataccggaagcggagtgatggcatctgcgcttagtatggataaactacgcagcaaacttctatggcaaggtgccggtttaccggtcgcgccgtgggtagcgttaacccgcgcagagtttgaaaaaggcctgagcgataagcagttagcagaaatttctgctctgggtttgccggttatcgttaagccgagccgcgaaggttccagtgtgggaatgagtaaagtagtagcagaaaatgctctacaagatgcattaagattggcatttcagcacgatgaagaagtattgattgaaaaatggctaagtgggccggagttcacggttgcgatactcggtgaagaaattttaccgagtatacgtattcaaccgtccggaaccttctatgattatgaggcgaagtatctctctgatgagacacagtatttctgccccgcaggtctggaagcgagtcaagaggccaatttgcaggcattagtgctgaaagcatggacgacgttaggttgcaaaggatggggacgtattgacgttatgctggacagcgatggacagttttatctgctggaagccaataccagtccgggtatgaccagccacagcctggtgccgatggcggcacgtcaggcaggtatgagcttcagccagttggtagtacgaattctggaactggcggactaatatgagccaggctgctctgaacacgcgaaacagcgaagaagaggtttcttctcgccgcaataatggaacgcgtctggcggggatccttttcctgctgaccgttttaacgacagtgttggtgagcggctgggtcgtgttgggctggatggaagatgcgcaacgcctgccgctcagtaagctggtgttgaccggtgaacgccattacacacgtaatgacgatatccggcagagcatcctggcattgggtgagccgggtacctttatgacccaggatgtcaacatcatccagacgcaaatagaacaacgcctgccgtggattaagcaggtgagcgtcagaaagcagtggcctgatgaattgaagattcatctggttgaatatgtgccgattgcgcggtggaatgatcaacatatggtagacgcggaaggaaataccttcagcgtgccgccagaacgcaccagcaagcaggtgcttccaatgctgtatggcccggaaggcagcgccaatgaagtgttgcagggctatcgcgaaatggggcagatgctggcaaaggacagatttactctgaaggaagcggcgatgaccgcgcggcgttcctggcagttgacgctgaataacgatattaagctcaatcttggccggggcgatacgatgaaacgtttggctcgctttgtagaactttatccggttttacagcagcaggcgcaaaccgatggcaaacggattagctacgttgatttgcgttatgactctggagcggcagtaggctgggcgcccttgccgccagaggaatctactcagcaacaaaatcaggcacaggcagaacaacaatgatcaaggcgacggacagaaaactggtagtaggactggagattggtaccgcgaaggttgccgctttagtaggggaagttctgcccgacggtatggtcaatatcattggcgtgggcagctgcccgagccgtggtatggataaaggcggggtgaacgacctcgaatccgtggtcaagtgcgtacaacgcgccattgaccaggcagaattgatggcagattgtcagatctctagcgtatatctggcgctttctggtaagcacatcagctgccagaatgaaattggtatggtgcctatttctgaagaagaagtgacgcaagaagatgtggaaaacgtcgtccataccgcgaaaagcgtgcgtgtgcgcgatgagcatcgtgtgctgcatgtgatcccgcaagagtatgcgattgactatcaggaagggatcaagaatccggtaggacttagcggcgtgcggatgcaggcaaaagtgcacctgatcacatgtcacaacgatatggcgaaaaacatcgtcaaagcggttgaacgttgtgggctgaaagttgaccaactgatatttgccggactggcaagtagttatagcgtattgacggaagatgaacgtgaactgggtgtctgcgtcgtcgatatcggtggtggtacaatggatatcgccgtttataccggtggggcattgcgccacactaaggtaattccttatgctggcaatgtcgtgaccagtgatatcgcttacgcctttggcacgccgccaagcgacgccgaagcgattaaagttcgccacggttgtgcgctgggttccatcgttggaaaagatgagagcgtggaagtgccgagcgtaggtggtcgtccgccacggagtctgcaacgtcagacactggcagaggtgatcgagccgcgctataccgagctgctcaacctggtcaacgaagagatattgcagttgcaggaaaagcttcgccaacaaggggttaaacatcacctggcggcaggcattgtattaaccggtggcgcagcgcagatcgaaggtcttgcagcctgtgctcagcgcgtgtttcatacgcaagtgcgtatcggcgcgccgctgaacattaccggtttaacggattatgctcaggagccgtattatagcacggcggtgggattgcttcactatgggaaagagagtcatcttaacggtgaagctgaagtagaaaaacgtgttacagcaagtgttggcagctggatcaagcgactcaatagttggctgcgaaaagagttttaatttttatgaggccgacgatgattacggcctcaggcgacaggcacaaatcggagagaaactatgtttgaaccaatggaacttaccaatgacgcggtgattaaagtcatcggcgtcggcggcggcggcggtaatgctgttgaacacatggtgcgcgagcgcattgaaggtgttgaattcttcgcggtaaataccgatgcacaagcgctgcgtaaaacagcggttggacagacgattcaaatcggtagcggtatcaccaaaggactgggcgctggcgctaatccagaagttggccgcaatgcggctgatgaggatcgcgatgcattgcgtgcggcgctggaaggtgcagacatggtctttattgctgcgggtatgggtggtggtaccggtacaggtgcagcaccagtcgtcgctgaagtggcaaaagatttgggtatcctgaccgttgctgtcgtcactaagcctttcaactttgaaggcaagaagcgtatggcattcgcggagcaggggatcactgaactgtccaagcatgtggactctctgatcactatcccgaacgacaaactgctgaaagttctgggccgcggtatctccctgctggatgcgtttggcgcagcgaacgatgtactgaaaggcgctgtgcaaggtatcgctgaactgattactcgtccgggtttgatgaacgtggactttgcagacgtacgcaccgtaatgtctgagatgggctacgcaatgatgggttctggcgtggcgagcggtgaagaccgtgcggaagaagctgctgaaatggctatctcttctccgctgctggaagatatcgacctgtctggcgcgcgcggcgtgctggttaacatcacggcgggcttcgacctgcgtctggatgagttcgaaacggtaggtaacaccatccgtgcatttgcttccgacaacgcgactgtggttatcggtacttctcttgacccggatatgaatgacgagctgcgcgtaaccgttgttgcgacaggtatcggcatggacaaacgtcctgaaatcactctggtgaccaataagcaggttcagcagccagtgatggatcgctaccagcagcatgggatggctccgctgacccaggagcagaagccggttgctaaagtcgtgaatgacaatgcgccgcaaactgcgaaagagccggattatctggatatcccagcattcctgcgtaagcaagctgattaagaattgactggaatttgggtttcgaggctctttgtgctaaactggcccgccgaatgtatagtacacttcggttggataggtaatttggcgagataatacgatgatcaaacaaaggacacttaaacgtatcgttcaggcgacgggtgtcggtttacataccggcaagaaagtcaccctgacgttacgccctgcgccggccaacaccggggtcatctatcgtcgcaccgacttgaatccaccggtagatttcccggccgatgccaaatctgtgcgtgataccatgctctgtacgtgtctggtcaacgagcatgatgtacggattagtaccgtagagcacctcaatgctgctctcgcgggcttgggcatcgataacattgttatcgaagttaacgcgccggaaatcccgatcatggacggcagcgccgctccgtttgtatacctgctgcttgacgccggtatcgacgagttgaactgcgccaaaaaatttgttcgcatcaaagagactgttcgtgtcgaagatggcgataagtgggctgaatttaagccgtacaatggttttagcctggatttcaccatcgattttaaccatccggctattgattccagcaaccagcgctatgcgatgaacttctccgctgatgcgtttatgcgccagatcagccgtgcgcgtacgttcggtttcatgcgtgatatcgaatatctgcagtcccgtggtttgtgcctgggcggcagcttcgattgtgccatcgttgttgacgattatcgcgtactgaacgaagacggcctgcgttttgaagacgaatttgtgcgtcacaaaatgctcgatgcgatcggtgacttgttcatgtgtggtcacaatattattggtgcatttaccgcttataaatccggtcatgcactgaataacaaactgctgcaggctgtcctggcgaaacaggaagcctgggaatatgtgaccttccaggacgacgcagaactgccgttggccttcaaagcgcctagtgctgtactggcataacgacatttatactgtcgtataaaattcgactggcaaatctggcactctctccggccaggtgaaccagtcgtttttttttgaattttataagagctataaaaaacggtgcgaacgctgttttcttaagcacttttccgcacaacttatcttcattcgtgctgtggactgcaggctttaatgataagatttgtgcgctaaatacgtttgaatatgatcgggatggcaataacgtgagtggaatactgacgcgctggcgacagtttggtaaacgctacttctggccgcatctcttattagggatggttgcggcgagtttaggtttgcctgcgctcagcaacgccgccgaaccaaacgcgcccgcaaaagcgacaacccgcaaccacgagcctagtgccaaagttaactttggtcaattggccttgctggaagcgaacacacgccgcccgaatagcaactattccgttgattactggcatcaacatgccattcgcacggtaatccgtcatctttctttcgcaatggcaccgcaaacactgcccgttgctgaagaatctttgcctcttcaggcgcaacatcttgcattactggatacgctcagcgcgctgctgacccaggaaggcacgccgtctgaaaagggttatcgcattgattatgcgcattttaccccacaagcaaaattcagcacgcccgtctggataagccaggcgcaaggcatccgtgctggccctcaacgcctcacctaacaacaataaacctttacttcattttattaactccgcaacgcggggcgtttgagattttattatgctaatcaaattgttaactaaagttttcggtagtcgtaacgatcgcaccctgcgccggatgcgcaaagtggtcaacatcatcaatgccatggaaccggagatggaaaaactctccgacgaagaactgaaagggaaaaccgcagagtttcgtgcacgtctggaaaaaggcgaagtgctggaaaatctgatcccggaagctttcgccgtggtacgtgaggcaagtaagcgcgtctttggtatgcgtcacttcgacgttcagttactcggcggtatggttcttaacgaacgctgcatcgccgaaatgcgtaccggtgaaggaaaaaccctgaccgcaacgctgcctgcttacctgaacgcactaaccggtaaaggcgtgcacgtagttaccgtcaacgactacctggcgcaacgtgacgccgaaaacaaccgtccgctgtttgaattccttggcctgactgtcggtatcaacctgccgggcatgccagcaccggcaaagcgcgaagcttacgcagctgacatcacttacggtacgaacaacgaatacggctttgactacctgcgcgacaacatggcgttcagccctgaagaacgtgtacagcgtaaactgcactatgcgctggtggacgaagtggactccatcctgatcgatgaagcgcgtacaccgctgatcatttccggcccggcagaagacagcagcgaaatgtataaacgcgtgaataaaattattccgcacctgatccgtcaggaaaaagaagactccgaaaccttccagggcgaaggccacttcagcgtggacgaaaaatctcgccaggtgaacctgaccgaacgtggtctggtgctgattgaagaactgctggtgaaagagggcatcatggatgaaggggagtctctgtactctccggccaacatcatgctgatgcaccacgtaacggcggcgctgcgcgctcatgcgctgtttacccgtgacgtcgactacatcgttaaagatggtgaagttatcatcgttgacgaacacaccggtcgtaccatgcagggccgtcgctggtccgatggtctgcaccaggctgtggaagcgaaagaaggtgtgcagatccagaacgaaaaccaaacgctggctagcatcaccttccagaactacttccgtctgtatgaaaaactggcggggatgaccggtactgctgataccgaagctttcgaatttagcagtatctacaagctggataccgtcgttgttccgaccaaccgtccaatgattcgtaaagatctgccggacctggtctacatgactgaagcggaaaaaattcaggcgatcattgaagatatcaaagaacgtactgcgaaaggccagccggtgctggtgggtactatctccatcgaaaaaagcgagctggtgagtaacgaactgaccaaagccggtattaagcacaacgtcctgaacgccaaattccacgccaacgaagcggcgattgttgctcaggcaggttatccggctgcggtgactatcgcgaccaatatggcgggtcgtggtacagatattgtgctcggtggtagctggcaggcagaagttgccgcgctggaaaatccgaccgcagagcaaattgaaaaaattaaagccgactggcaggtacgtcacgatgcggtactggaagcaggtggcctgcatatcatcggtaccgagcgtcacgaatcccgtcgtatcgataaccagttgcgcggtcgttctggtcgtcagggggatgctggttcttcccgtttctacctgagcatggaagatgcgctgatgcgtatttttgcttccgaccgagtatccggcatgatgcgtaaactgggtatgaagccaggcgaagccattgaacacccgtgggtgactaaagcgattgccaacgcccagcgtaaagttgaaagccgtaacttcgacattcgtaagcaactgctggaatatgatgacgtggctaacgatcagcgtcgcgccatttactcccagcgtaacgaactgttggatgtcagcgatgtgagcgaaaccattaacagcattcgtgaagatgtgttcaaagcgaccattgatgcctacattccaccacagagcctggaagaaatgtgggatattccggggctgcaggaacgtctgaagaacgatttcgacctcgatttgccaattgccgagtggctggataaagaaccagaactgcatgaagagacgctgcgtgagcgcattctggcgcagtccatcgaagtgtatcagcgtaaagaagaagtggttggtgctgagatgatgcgtcacttcgagaaaggcgtcatgctgcaaacgcttgactccctgtggaaagagcacctggcagcgatggactatctgcgtcagggtatccacctgcgtggctacgcacagaaagatccgaagcaggaatacaaacgtgaaagcttctccatgtttgcagcgatgctggagagcttgaaatatgaagttatcagtacgctgagcaaagttcaggtacgtatgcctgaagaggttgaggagctggaacaacagcgtcgtatggaagccgagcgtttagcgcaaatgcagcagcttagccatcaggatgacgactctgcagccgcagctgcactggcggcgcaaaccggagagcgcaaagtaggacgtaacgatccttgcccgtgcggttctggtaaaaaatacaagcagtgccatggccgcctgcaataaaagctaactgttgaagtaaaaggcgcaggattctgcgccttttttataggtttaagacaatgaaaaagctgcaaattgcggtaggtattattcgcaacgagaacaatgaaatctttataacgcgtcgcgcagcagatgcgcacatggcgaataaactggagtttcccggcggtaaaattgaaatgggtgaaacgccggaacaggcggtggtgcgtgaacttcaggaagaagtcgggattaccccccaacattttagcctatttgaaaaactggaatatgaattcccggacaggcatataacactgtggttttggctggtcgaacgctgggaaggggagccgtggggtaaagaagggcaacccggtgagtggatgagcctggtcggtcttaatgccgatgattttccgccagccaatgaaccggtaattgcgaagcttaaacgtctgtaagtcagataaggcgttttcgccgcatccgacattcgcacacgatgcctgatgcgacgctggcgcgtcttatcaggcctaaagggatttctaactcattgataaatttgtttttgtaggtcggataaggcgttcacgccgcatccgacatttgcacaagatgcctgatgcgacgctgtccgcgtcttatcaggcctacgtgcggcatcagacaaatgtcactgctttggttcttcgctccagtcatcgctttcggaaagatcgccactgctggggattcgtttttcttcagcagcccattctccgaggtcgatcagctgacaacgtttggagcaaaatggccgaaacgggctgatttcaccccacaccaccgttttcccgcaggttgggcaattcaccgtaatagtttcactcatttttactccttagcaacaggccagttcgaaatccagacgttccggtacctgtccgttttcagtgtccagcggcataaaacgaatggcaaaacggctcttatgtccggaaatttgcggataaagctgactatcgaggctcagattcaggcgcagcaagtcggcatcgccaccgttatcctgataaaaaccattcaggctggtttgtttacggaagggggcgctctggcgaattaaatccagcaccatggtaagtgcctgggtgagcgggttcaggctggcaatccaggtttctacctggctgtcgcgctgcgcctggggtagatgcagccaaatgtgcaatgtaggtaaatcaaagctgcaacagccgcctgggatgctcagtcgctgacgcaccagagcaatcaaacgatcttcacgcagaaattgcccgatacgcggcgcggaaattaatacgctccccgccgcttttaactgctgaattaatgcttcaatacggctctggtccacgccaggcacgccaatccaggtctggagtttacgttgctgccggtcaagttctttcaacagctcagtgcggacttcgccgcgctcgaaaacatccagtaattcactgacattacggaagaaatgcagcgcgccagcgtggtcaacgatgggtaaattaacggtgagttgctgaatcaaaaactcaatgcgcagccatgtacgcattttttcatttagtggatgttcaaaaaggacctgggtctgcattacggtttttcctgactgacaaactggctcgcaagctgcaaatagtgtgcgtgcaggcgggcaacatcgcttgcgatagcatccggtgcgccgttattatcaatgacgtcatctgccacggcaaggcgggcttcgcgcgttgcctgagcagcaaggatttgttcgacatgctcgcgagttacatcatcgcgctgcatggtgcgcttaagttgcgtttctgggctgacatccaccacaagcactcgattcgcttttttatacagactgttttctaccagcaatggcacaacccacagtacatagggggaagtagcttgctggatctggtgttgcgtctcttgctgaatcagcggatgcagcagggcgttaagccagtttttctcttccgggttggcgaagatccgctcgcgcaaggcccggcgctgcaatgttccatcagcagcaatcatgttagcgccaaagtgatcagcaatggcatgtagcgcaggtgcacctggttcaaccacctgacgcgcaataatatcggcatcaatgacgttaattccgagatcagcaaacgcattggcaacggtactcttgccactgccaatgcctcccgttaaggcaactatatacctcataatttatattcccgggaattcatcatgattatcaaaacgttaaaaatgagtgcacgaaagcgaaattgatgaaacgttcgctcactatttaccaggtaaatttatgggattgtagcgtaaaaaaagacaatttcgcagtcttgcgccgcattgattagtgcgtatgatagcgtcactggagttgcgctcttacccttatagccattaaccccaggaatccgcacatgcgtattgaagaagatctgaagttaggttttaaagacgttctcatccgccctaaacgctccactcttaaaagccgttccgatgttgaactggaacgtcaattcaccttcaaacatagtggtcagagctggtccggcgtgccgattatcgccgcaaatatggacaccgtaggcacattttctatggcctctgcgctggcttcttttgatattttgactgctgtgcataaacactattctgtcgaagagtggcaagcgtttatcaacaattcttccgctgatgtgctgaaacatgtgatggtttctaccggtacgtctgatgcggatttcgaaaaaactaaacagattctcgacctgaacccggcattaaacttcgtttgtattgacgtggcgaatggttattccgaacacttcgtgcagttcgttgcgaaagcgcgtgaagcgtggccgaccaaaaccatttgtgctggtaacgtagtgactggtgaaatgtgtgaggagcttatcctcagtggtgccgatatcgttaaagttggcattggcccaggttctgtttgtacaactcgcgtcaaaacaggcgtcggttatccgcaactttctgcggtaatcgaatgtgccgatgctgcgcacggtctgggcggaatgatcgtcagcgatggtggctgcaccacgccgggcgatgtggcgaaagcctttggcggcggtgccgatttcgtcatgcttggcggcatgctggcgggccacgaagagagcggcggtcgcatcgttgaggagaacggcgagaaatttatgctgttctacggcatgagctccgagtctgcgatgaaacgtcacgttggcggcgttgcggaatatcgcgcagcagaaggtaaaaccgttaagctgccgctgcgaggcccggttgaaaataccgcgcgagatattttgggcggcctgcgtagtgcttgtacatacgttggggctagtcgcctgaaagagctgaccaagcgcaccacgtttattcgtgtgcaggaacaagaaaaccgcatcttcaacaacctgtaatctcccaacgctggcgtggagcaacacgccagcgttatcccatcccactcatcgcatcgcctaaatggaaaattggcagatacattgccaccaccagcgtaccaataattcctcccgttatgatcagcaacgccggttccagtaaggctgcgaggttatccgccagcgccattgtgttttcccgatgatgatgggcgaggttgtctaacatgagatccagagagccggatgcctctcctgttctcactaattgcaaacagagcgggctaaactcaccggtattttttagcgccagccagatgggttgaccgttactgatatcgtgctggatttgtgtcagaagttgcacccagtacgggcagcgcattgtttctctgacgctctctacgccctgtaaaaaagtaatgcctgcactttgtgtcagcgccagaatcgtaaagatctgcgtgagtttttgtccccgcatcagactacccataatcgggatgcgtaacagcaatttctgccgcactataagccaggtcggtcggcgcatcagcaacttattggctatcgccagcagaaagccgaacaacaccagcagccagctccattcgccactaaagtctgccagcgtcatgatcccctgcgttagtgccggtagtggggtgttgaaggtcttatagatagcggcaaactccggcagaacaaaatgcagcattgccacaaccaccatgattgccatcgctaaaatgatgatgggataacgtaacgcacttttcactttgtcggtcaactgacgctgggctttttgctgacgcgccagttcaaagcagcattcatccagcttaccggtcagttcacccgtgcggatcatcgcctgatagagcggcggaaatacctcactccagggtaataaggcattggaaaaagcaatgccctgttcgagatcgtgcgccaggctttgcagcaacgcttgccattgcttactgggatgctgttccgccagcagagccagcccttcagaaagcgttaaccctgctttgagtagcgtcgccagttgatgaatgacttccgcgcttttatctcctcgccactgcgcagaattgatggcgattcgcttcaggcttagtggggtaaccatctgttgctgtagtgccataagcagtaaagtacggctctctgcccatagcatcccatcttgcgcattgccgtcgccggttatgccatgccagcgccagagttgcttactcgccatgcggcatccccagtacgcggattaactcttcaaaggtggttaagccttgctctacggccaggcagccgttttcaaaaagcgtacgcatacccgcctgtcgtgcgtgcgtttccaggctttcaacgtcggtattagcggaaataagctgacgaatgaccggcgttatgggcagaacttcaaataaggccgtacgaccataaaaaccgtggtagcaatgtacacaaccgggtgcctgccagtggggcagcgggcttggccatacattgtctggaatgtggatgggctccccttgctgccggcgacaatgtgggcaaagtttgcgtaccagacgctgggctattaccagcgtaagcgcgctacttagcatccagcgggcgacccccatttgctgtaaacgtaccagcgtttcgcaggtggaattagtgtgtagggtagacaacaccaggtgaccagtttgcgccgctttaatagcgatctctgctgtttcgccatcgcggatctctccgatcatgatgacgtcaggatcctggcgcaataacgcacgcaaaacgccctgaaaggtgagtccggcacgcggatggatttgcgtctggtttagtccggctatggggatctcaactggatcttcgacgctacaaatattaatgtcagcggtattcagcttttgcagggcactataaagcgtgaccgttttgccgctgccggtagggccagttaccagcaccagtccctgtggttgttgcaaggcatgagcaaagtccgccagttgtaacggctgcattccaagcgtgttgacatccagtgcctgacccacctgctgtaacaaccttaataccaccttttcaccaccccgacatggtaaggtcgcaatacgaaaactgacggcgtttcctgccagttcgacagtgaattgcccgtcctgcggcaggcgatgttccgcaatatccaggtttcccagcacttttaatctggcggttaatgcgactccggcatccggactaacatccggtaaaggatgcaatacgccgtcgatacgcaagcggatgcggtaggcattgtccgctggttcgatatgaatatcagacgcgcgttgttccagcgcagattgtaacgttcgagttagcaactctgctttgggctgatgcttctcctgaacagctacgggcagtgtctgttgtgtgcgactggcgtgaccttccatttgttggcgcgtccagcaggtgatctcaatacgtttggtggtagcgaaatgcaatgcgtccagtagctcatggctaggtgcatcgactaccgcaacatgaaccacctcttcgctggcatccagcaagactccatgataacgcagacacagggcagtgagctgtggaatattcattgccgctccttagttggcgtcatcaaagcggaagacatcttcgcaggcttgctgcaatgcgctgtcactttgaatattgcagttgcgcgtccagccggtgacgccgtttgcgttatcccaacccggtgtcatgacgacgcttagcccattgagactttcttgcccggtcaggctcaccacgccctttgccacactcatggcactaacatagcgggtggtggtagggctgggaatgccattgctgccaccgtcgcaggtatctaatccaccatgttccagcgcgcacaactctacggcggtacggtaaggcacaaaggtttgtagcatgtcggtgagtgcggctttgcgcaggtagttttgataagcgggaataccaatggcgcttaaaatggcaatgatgccaataaccaccatcagttcgataagtgtaaaaccgcgttgcttgtccatctgtttcgctccttgatttggttggcgctactttggcaaacgccatcagcacaggcgaggggcaaaaaacgaaacgggaaagcagattccgaggttttttatttcgttgcagcgaaagacaagaaatttgcgaggcgttacgaagaaagttggggaaggggagattatccgcccgcgatggagcggataaatctgtcaactattagcgaaaacgcatactaaggtcgagtgcttgtacgtgtttagttagcgcaccgacggagataaagtccacgcccgtttcggcaaattcacgcagtgttttgtcagtgacgttgccagacacttccagtagcgccttgccgttggtgcgtttgacggcttcgcgcatctgttctgtttcgaagttatccagcatgatgatatcggctcctgctttcagggcttcatcaagttcttccagattctctacttcgacttctactggcgcatccgggtgcagccaggacgctttttcgaccgcctggcgcacactgccggaggcaataatatggttttctttgatcaggaaggcatcagaaagccccagacggtgattcgctccgccgccgcaaagtaccgcgtatttcagagcactacgcaggccgggtaaggttttgcgcgtatccaacaactgcgtgttggtgccttccagcaattcgacatagtggcgtaccttactggcaactccactaagggtttgcacaaaattaagcgcagtgcgttcgcccgttaacagcacgcgggatgggccttcaagttcgaacaaggattgattggcattgatgacatcgccgtcatccacatgccagattatggtgacatcgtcgcctgccagttgaataaacacctcttcaacccagcgtttgccgcaaaagacgccattctcgcgggtgatcaccgtggcatgagagcgagaattttccggtaaaagttttgccgtaatatcattgttggcatcgactgttccgcctaaatcttcccgcagcgcctgggccaccgcgccggggatatcgagattaatgcgttccagcagctcgtcacgtcgggtgtcagggttatagcggcgaggcggcatgttaaaactccagatagctaacgaatcataaggtagaaacatgctactctgaaccgggtattagcaccacatataaggagatcctgcatgttgttagaacaggggtggctggttggcgcgcgccgcgttcccagtccacattacgattgccgcccggatgacgaaacacccaccctgctggtggtgcacaatattagcctgccgccaggcgagtttggcggtccgtggatcgacgcattattcactggaactattgatccgcaggcacatcctttctttgctgagatcgcccatttgcgcgtctccgctcactgtttgattcgccgtgatggtgaaatagtccagtatgttcctttcgataaacgtgcatggcatgcgggagcctctcagtatcaggggcgcgaacgctgcaatgatttttctattgggattgagcttgaaggcaccgatacgctggcgtataccgatgcgcagtatcaacagcttgcggcggttacgcgggcactgattgattgctatccggatatcgctaaaaacatgacgggccattgtgatattgcgccggatcggaaaaccgatcccggtcctgcatttgattgggcacggtttcgtgtgctggtcagcaaggagacaacatgacgctatttacaaccttactggtgttaattttcgagcgcctgtttaagttgggcgagcactggcagcttgatcatcgtcttgaagcgttctttcggcgggtgaaacatttttctctcgggcgcacgttaggcatgaccattattgcgatgggcgtgacttttttactgttacgcgcattgcagggagtattgttcaacgttcccacgctactggtgtggctgctgattggtttgctgtgtattggcgcaggtaaagttcgtcttcattatcatgcttatctgacagctgctagtcgtaatgatagccatgcccgtgccacgatggctggcgaactcaccatgattcacggcgtcccggcaggctgcgacgaacgtgagtatttgcgtgagctgcaaaatgcattgctgtggattaactttcgtttttatcttgcaccgctgttctggctgattgtggggggaacctggggacccgttacgctgatggggtatgcgtttttgcgtgcatggcaatactggctggcgcgatatcagacgccgcatcatcgtttacagtccggcattgatgccgtgcttcatgtactggattgggtgccggttcgtcttgcgggtgtggtatatgccttgatcggtcatggtgagaaagcgttaccggcctggtttgctagcctgggtgatttccatactagccagtatcaggtgttaacgcgtctggcgcagttctctctggcgcgtgaaccgcatgtcgataaggtggagacgccgaaggcagcggttagtatggcgaagaaaaccagcttcgtggtcgtggtggtgattgcactactgacgatttacggggcgttggtgtaaagattattgccctcaccctgtacgggtgagggcgtagagagattaatgcgcttttacggctttggcggttttctctttaaacagatagccgatacctaacacgatcagccataccgggatcaggtatacgctaatcgccattcctggggtcatcagcataatcaccagtaccgccgccataaacagcaggcagatccagttacccagcggataaagcagagcagggaagcgagttaccacgccttgttcctgcttggcgcgacggaatttcatatgcgccaggctaatcatcgcccagttgattaccagtgcagataccaccagcgccattaacagtccgaaagcggactctggggcaaggtagttaatcagtacgcacaacgccgttaccagtgcagacaccagaatggtatttactggtacaccacgtttatcgacagacgccagcgcttttggcgcattaccctgttgtgccagaccaaacagcatacggctgttgcaatatacgcagctgttgtacacggagagcgccgcagtcagtaccacgatgttcagcgcattcgccacaaaggtatcgcctaactcgtggaagatcagcacaaacggactggtatcggcggtaacgcgggtccacggcatcagactgagcagaacggctaagctaccaatatagaaaatcaggatgcggtagataacctggttagttgctttcggtatactttgctccgggttatcagcttctgctgcggtgatccccaccagttccagaccaccgaagctgaacatgataatcgccatcatcatcaccagcccggtgaagccgtgcggcaggaaaccaccctgatcccacaggttgctaacggtcgcctgcgggccgccgttgccactgaatagcagccagccgccgaagatgatcatcgctaccaccgcgataactttgataatggcaaaccagaactccatctcgccaaacactttaacgttggtcaggttgatggcgttaatcaccacaaagaatacggcggcagaaacccaggtggggatttccggataccagaactgaatgtatttacccacggcagtcagctcagccatggcaactaaaacgtacagtacccagtagttccagccagaggcgaaaccggcaaaactgccccagtatttataagcaaagtggctaaaggagcctgcgacaggttcttcgaccaccatttcacccagctgacgcatgatcagaaaggcgataaaaccagcaatggcgtaacccaggataatccctggccctgcggactgtattacggaggcgctacccaggaataacccggtccctatcgcgccacccagcgcgataagctgaatatggcggtttttaaggccgcgctttagctgctcgccgtgctgttgaccttccatcatgaaacctcgtgcggtggttgtttttttgatctacgcagtgatgcgtgtgtaagtttgcaattccgtttgttgtattaatttgtttacatcaaagaagtttgaattgttacaaaaagacttccgtcagatcaagaataatggtatgcggcagcgaatgcacccgctttatgcatggttgaagatgagttgcttaaaaagaaaccgtttgtaaagctcagcctcaacccctctcaatatgtagaatgaatttaaattcgttttaattgaattaaaaatcacaaaattggtaagtgaatcggttcaattcggatttttatagtttaataatcgttaaaaaactcctttcctacgtaaagtctacatttgtgcatagttacaactttgaaacgttatatatgtcaagttgttaaaatgtgcacagtttcatgatttcaatcaaaacctgtatggacataaggtgaatactttgttactttagcgtcacagacatgaaattggtaagaccaattgacttcggcaagtggcttaagacaggaactcatggcctacagcaaaatccgccaaccaaaactctccgatgtgattgagcagcaactggagtttttgatcctcgaaggcactctccgcccgggcgaaaaactcccaccggaacgcgaactggcaaaacagtttgacgtctcccgtccctccttgcgtgaggcgattcaacgtctcgaagcgaagggcttgttgcttcgtcgccagggtggcggcacttttgtccagagcagcctatggcaaagcttcagcgatccgctggtggagctgctctccgaccatcctgagagtcagtatgacttgctcgaaacacgacacgccctggaaggtatcgccgcttattacgccgcgctgcgtagtaccgatgaagacaaggaacgcatccgtgaactccaccacgccatagagctggcgcagcagtctggcgatctggacgcggaaagtaacgccgtactccagtatcagattgccgtcaccgaagcggcccacaatgtggttctgcttcatctgctaaggtgtatggagccgatgttggcccagaatgtccgccagaacttcgaattgctctatagccgtcgcgagatgctgccgctggtgagtagtcaccgcacccgcatatttgaagcgattatggccggtaagccggaagaagcgcgcgaagcaagccatcgccatctggcctttatcgaagaaattttgctcgacagaagtcgtgaagagagccgccgtgagcgttctctgcgtcgtctggagcaacgaaagaattaatgatttttctggtaaaaattatccagaagatgttgtaaatcaagcgcatataaaagcgcggcaactaaacgtagaacctgtcttattgagctttccggcgagagttcaatgggacaggttccagaaaactcaacgttattagatagataaggaataacccatgagtgaacgtttcccaaatgacgtggatccgatcgaaactcgcgactggctccaggcgatcgaaagcgtcatccgtgaagaaggtgttgagcgtgctcagtatctgatcgaccaactgcttgctgaagcccgcaaaggcggtgtaaacgtagccgcaggcacaggtatcagcaactacatcaacaccatccccgttgaagaacaaccggagtatccgggtaatctggaactggaacgccgtattcgtagtgctatccgctggaacgccatcatgacggtgctgcgtgcgagcaaaaaagacctcgaactgggcggccatatggcgtccttccagtcttccgcaaccatttatgatgtgtgctttaaccacttcttccgtgcacgcaacgagcaggatggcggcgacctggtttacttccagggccacatctccccgggcgtgtacgctcgtgctttcctggaaggtcgtctgactcaggagcagctggataacttccgtcaggaagttcacggcaatggcctctcttcctatccgcacccgaaactgatgccggaattctggcagttcccgaccgtatctatgggtctgggtccgattggtgctatttaccaggctaaattcctgaaatatctggaacaccgtggcctgaaagatacctctaaacaaaccgtttacgcgttcctcggtgacggtgaaatggacgaaccggaatccaaaggtgcgatcaccatcgctacccgtgaaaaactggataacctggtcttcgttatcaactgtaacctgcagcgtcttgacggcccggtcaccggtaacggcaagatcatcaacgaactggaaggcatcttcgaaggtgctggctggaacgtgatcaaagtgatgtggggtagccgttgggatgaactgctgcgtaaggataccagcggtaaactgatccagctgatgaacgaaaccgttgacggcgactaccagaccttcaaaagcaaagatggtgcgtacgttcgtgaacacttcttcggtaaatatcctgaaaccgcagcactggttgcagactggactgacgagcagatctgggcactgaaccgtggtggtcacgatccgaagaaaatctacgctgcattcaagaaagcgcaggaaaccaaaggcaaagcgacagtaatccttgctcataccattaaaggttacggcatgggcgacgcggctgaaggtaaaaacatcgcgcaccaggttaagaaaatgaacatggacggtgtgcgtcatatccgcgaccgtttcaatgtgccggtgtctgatgcagatatcgaaaaactgccgtacatcaccttcccggaaggttctgaagagcatacctatctgcacgctcagcgtcagaaactgcacggttatctgccaagccgtcagccgaacttcaccgagaagcttgagctgccgagcctgcaagacttcggcgcgctgttggaagagcagagcaaagagatctctaccactatcgctttcgttcgtgctctgaacgtgatgctgaagaacaagagcatcaaagatcgtctggtaccgatcatcgccgacgaagcgcgtactttcggtatggaaggtctgttccgtcagattggtatttacagcccgaacggtcagcagtacaccccgcaggaccgcgagcaggttgcttactataaagaagacgagaaaggtcagattctgcaggaagggatcaacgagctgggcgcaggttgttcctggctggcagcggcgacctcttacagcaccaacaatctgccgatgatcccgttctacatctattacagcatgttcggcttccagcgtattggcgatctgtgctgggcggctggcgaccagcaagcgcgtggcttcctgatcggcggtacttccggtcgtaccaccctgaacggcgaaggtctgcagcacgaagatggtcacagccacattcagagcctgactatcccgaactgtatctcttacgacccggcttacgcttacgaagttgctgtcatcatgcatgacggtctggagcgtatgtacggtgaaaaacaagagaacgtttactactacatcactacgctgaacgaaaactaccacatgccggcaatgccggaaggtgctgaggaaggtatccgtaaaggtatctacaaactcgaaactattgaaggtagcaaaggtaaagttcagctgctcggctccggttctatcctgcgtcacgtccgtgaagcagctgagatcctggcgaaagattacggcgtaggttctgacgtttatagcgtgacctccttcaccgagctggcgcgtgatggtcaggattgtgaacgctggaacatgctgcacccgctggaaactccgcgcgttccgtatatcgctcaggtgatgaacgacgctccggcagtggcatctaccgactatatgaaactgttcgctgagcaggtccgtacttacgtaccggctgacgactaccgcgtactgggtactgatggcttcggtcgttccgacagccgtgagaacctgcgtcaccacttcgaagttgatgcttcttatgtcgtggttgcggcgctgggcgaactggctaaacgtggcgaaatcgataagaaagtggttgctgacgcaatcgccaaattcaacatcgatgcagataaagttaacccgcgtctggcgtaagaggtaaaagaataatggctatcgaaatcaaagtaccggacatcggggctgatgaagttgaaatcaccgagatcctggtcaaagtgggcgacaaagttgaagccgaacagagcctgatcaccgtagaaggcgacaaagcctctatggaagttccgtctccgcaggcgggtatcgttaaagagatcaaagtctctgttggcgataaaacccagaccggcgcactgattatgattttcgattccgccgacggtgcagcagacgctgcacctgctcaggcagaagagaagaaagaagcagctccggcagcagcaccagcggctgcggcggcaaaagacgttaacgttccggatatcggcagcgacgaagttgaagtgaccgaaatcctggtgaaagttggcgataaagttgaagctgaacagagcctgatcaccgtagaaggcgacaaggcttctatggaagttccggctccgtttgctggcaccgtgaaagagatcaaagtgaacgtgggtgacaaagtgtctaccggcagcctgattatggtcttcgaagtcgcgggtgaagcaggcgcggcagctccggccgctaaacaggaagcagctccggcagcggcccctgcaccagcggctggcgtgaaagaagttaacgttccggatatcggcggtgacgaagttgaagtgactgaagtgatggtgaaagtgggcgacaaagttgccgctgaacagagtctgatcaccgtagaaggcgacaaagcttctatggaagttccggcgccgtttgcaggcgtcgtgaaggaactgaaagtcaacgttggcgataaagtgaaaactggcagcctgattatgatcttcgaagttgaaggcgcagcgcctgcggcagctcctgcgaaacaggaagcggcagcgccggcaccggcagcaaaagctgaagccccggcagcagcaccagctgcgaaagcggaaggcaaatctgaatttgctgaaaacgacgcttatgttcacgcgactccgctgatccgccgtctggcacgcgagtttggtgttaaccttgcgaaagtgaagggcactggccgtaaaggtcgtatcctgcgcgaagacgttcaggcttacgtgaaagaagctatcaaacgtgcagaagcagctccggcagcgactggcggtggtatccctggcatgctgccgtggccgaaggtggacttcagcaagtttggtgaaatcgaagaagtggaactgggccgcatccagaaaatctctggtgcgaacctgagccgtaactgggtaatgatcccgcatgttactcacttcgacaaaaccgatatcaccgagttggaagcgttccgtaaacagcagaacgaagaagcggcgaaacgtaagctggatgtgaagatcaccccggttgtcttcatcatgaaagccgttgctgcagctcttgagcagatgcctcgcttcaatagtagcctgagcgaagacggtcagcgtctgaccctgaagaaatacatcaacatcggtgtggcggtggataccccgaacggtctggttgttccggtattcaaagacgtcaacaagaaaggcatcatcgagctgtctcgcgagctgatgactatttctaagaaagcgcgtgacggtaagctgactgcgggcgaaatgcagggcggttgcttcaccatctccagcatcggcggcctgggtactacccacttcgcgccgattgtgaacgcgccggaagtggctatcctcggcgtttccaagtccgcgatggagccggtgtggaatggtaaagagttcgtgccgcgtctgatgctgccgatttctctctccttcgaccaccgcgtgatcgacggtgctgatggtgcccgtttcattaccatcattaacaacacgctgtctgacattcgccgtctggtgatgtaagtaaaagagccggcccaacggccggcttttttctggtaatctcatgaatgtattgaggttattagcgaatagacaaatcggttgccgtttgttgtttaaaaattgttaacaattttgtaaaataccgacggatagaacgacccggtggtggttagggtattacttcacataccctatggatttctgggtgcagcaaggtagcaagcgccagaatccccaggagcttacataagtaagtgactggggtgagggcgtgaagctaacgccgctgcggcctgaaagacgacgggtatgaccgccggagataaatatatagaggtcatgatgagtactgaaatcaaaactcaggtcgtggtacttggggcaggccccgcaggttactccgctgccttccgttgcgctgatttaggtctggaaaccgtaatcgtagaacgttacaacacccttggcggtgtttgcctgaacgtcggctgtatcccttctaaagcactgctgcacgtagcaaaagttatcgaagaagccaaagcgctggctgaacacggtatcgtcttcggcgaaccgaaaaccgatatcgacaagattcgtacctggaaagagaaagtgatcaatcagctgaccggtggtctggctggtatggcgaaaggccgcaaagtcaaagtggtcaacggtctgggtaaattcaccggggctaacaccctggaagttgaaggtgagaacggcaaaaccgtgatcaacttcgacaacgcgatcattgcagcgggttctcgcccgatccaactgccgtttattccgcatgaagatccgcgtatctgggactccactgacgcgctggaactgaaagaagtaccagaacgcctgctggtaatgggtggcggtatcatcggtctggaaatgggcaccgtttaccacgcgctgggtagtcagattgacgtggttgaaatgttcgaccaggttatcccggcagctgacaaagacatcgttaaagtcttcaccaagcgtatcagcaagaaattcaacctgatgctggaaaccaaagttaccgccgttgaagcgaaagaagacggcatttatgtgacgatggaaggcaaaaaagcacccgctgaaccgcagcgttacgacgccgtgctggtagcgattggtcgtgtgccgaacggtaaaaacctcgacgcaggcaaagcaggcgtggaagttgacgaccgtggtttcatccgcgttgacaaacagctgcgtaccaacgtaccgcacatctttgctatcggcgatatcgtcggtcaaccgatgctggcacacaaaggtgttcacgaaggtcacgttgccgctgaagttatcgccggtaagaaacactacttcgatccgaaagttatcccgtccatcgcctataccgaaccagaagttgcatgggtgggtctgactgagaaagaagcgaaagagaaaggcatcagctatgaaaccgccaccttcccgtgggctgcttctggtcgtgctatcgcttccgactgcgcagacggtatgaccaagctgattttcgacaaagaatctcaccgtgtgatcggtggtgcgattgtcggtactaacggcggcgagctgctgggtgaaatcggcctggcaatcgaaatgggttgtgatgctgaagacatcgcactgaccatccacgcgcacccgactctgcacgagtctgtgggcctggcggcagaagtgttcgaaggtagcattaccgacctgccgaacccgaaagcgaagaagaagtaatttttcgtttgccggaacatccggcaattaaaaaagcggctaaccacgccgctttttttacgtctgcaatttacctttccagtcttcttgctccacgttcagagagacgttcgcatactgcactccgttgctcgttattcagcctgacagtatggttactgtcgtttagacgttgtgggcggctctcctgaactttctcccgaaaaacctgacgttgttcaggacttgcgctttgaacacgctggcgggcgttatcacgttgctgttgattcagtgggcgctgctgtactttttccttaaacacctggcgctgctctggacttgcggactgaatacgctcacgcgctgcgtctcttcgctgctggttctgcgggttagtctgcattttctcgcgaaccgcctggcgctgctcagggctggcggactgaatgcgctcacgcgctgcctctcttcgctgctggatcttcgggttagtctgcattctctcgcgaactgcctggcgctgctcagggctggcggactgataacgctgacgagcggcgtccttttgttgctgggtcagtggttggcgacggctgaagtcgtggaagtcgtcatagctcccatagtgttcagcttcattaaaccgctgtgccgctgcctgacgttgggtatctcgtgtaatgactggtgcggcgtgtgttcgttgctgaaactgatttgctgccgcctgacgctggctgtcgcgcgttggggcaggtaattgcgtggcgctcattccgccgttgacatcggtttgatgaaaccgctttgccatatcctgatcatgatagggcacaccattacggtagtttggattgtgccgccatgccatattcttatcagtaagatgctcaccggtgatacggttgaaattgttgacgtcgatattgatgttgtcgccgttgtgttgccagccattaccgtcacgatgaccgccatcgtggtgatgataatcatcattgtcatgatgatgatggtcatgatcgtcgtcgtcccagtcgatgctgctgaatagtgcgtacgtggtagcaacgcccatgctatagccgaatccgcgtacaaagctgtcaacaaacggttctccggctggtggtggcagataaaccggcggatacgcagtattggcccagttcccgtaaaccacggttgggttgtagttgggaatatagaccacatcaggattggcgggctcaatggaaatgacggttgttgccggctctgtaatgacggggttggcagttaaaactgtattggatggtatgacgggtgccgtgactgtctgttttaccggtacagctttcttcgttgtggtaataactttctgttcggtactactcttcaggctgccggtttgttgcgccagttgccgcaatcgctgtacgctgtccatcacgtcctgcggctgggccagaaaagcatcgcccaggttttgcacccattgcgggttttcgcccatcaatgccatcaattgtggaaaggccaccagacttttaacgctggcgtcccacggctggtcagataccgcctgaatagcagcatcgccttgtttaagtggattatcgtggctccattgcactgcttgagcaacgtttgtcggataggtacttgccatcagcacctggctaagtagggcgtcgggatacagcgcgacgggcgcgacccattgatctatttgtgcagtgctgaatgcggatttgacgacggcgggtgttacgggaggtgcggaaaccgttgcaggaaacgtaaccgcggcagcgtcagacacagccagttgtgtgctttgcggttccacaggcgcttccactgtgcggctttttatatatagcccggtagaggcggcacaaagcccggcactgcaaattagcgccagcacatggggtttaaacggcaaagtcattttcataattcggatctcaaggaaatcgcaatggtcggcgaactgccacccgcaggtgctgtgaatccgagtataaagaggcggtagtttaaattttgactaatcttgggattcgttgagaaaggtgattatcaccatgcgaattaacgaagtttttacggagggaaacaatctctagaccatccttaacgattcagccacttttttatgttgcttttttgtaaacagattaacacctcgtcaaaatcctgctattctgcccgttgcggtactgggcatttaccctacaaactgctgtctcacaggagcgtgaagagaatcgcctgccgcactatgacaatgagagcgaggagaaccgtcgtgctagaagaataccgtaagcacgtagctgagcgtgccgctgaggggattgcgcccaaacccctggatgcaaaccaaatggccgcacttgtagagctgctgaaaaacccgcccgcgggcgaagaagaattcctgttagatctgttaaccaaccgtgttcccccaggcgtcgatgaagccgcctatgtcaaagcaggcttcctggctgctatcgcgaaaggcgaagccaaatcccctctgctgactccggaaaaagccatcgaactgctgggcaccatgcagggtggttacaacattcatccgctgatcgacgcgctggatgatgccaaactggcacctattgctgccaaagcactttctcacacgctgctgatgttcgataacttctatgacgtagaagagaaagcgaaagcaggcaacgaatatgcgaagcaggttatgcagtcctgggcggatgccgaatggttcctgaatcgcccggcgctggctgaaaaactgaccgttactgtcttcaaagtcactggcgaaactaacaccgatgacctttctccggcaccggatgcgtggagtcgcccggatatcccactgcacgcgctggcgatgctgaaaaacgcccgtgaaggtattgagccagaccagcctggtgttgttggtccgatcaagcaaatcgaagctctgcaacagaaaggtttcccgctggcgtacgtcggtgacgttgtgggtacgggttctagccgtaaatccgccactaactccgttctgtggtttatgggcgatgatattccacatgtgccgaacaaacgcggcggtggtttgtgcctcggcggtaaaattgcacccatcttctttaacacgatggaagacgcgggtgcactgccaatcgaagtcgacgtctctaacctgaacatgggcgacgtgattgacgtttacccgtacaaaggtgaagtgcgtaaccacgaaaccggcgaactgctggcgaccttcgaactgaaaaccgacgtgctgattgatgaagtgcgtgctggtggccgtattccgctgattatcgggcgtggcctgaccaccaaagcgcgtgaagcacttggtctgccgcacagtgatgtgttccgtcaggcgaaagatgtcgctgagagcgatcgcggcttcagcctggcgcaaaaaatggtaggccgtgcctgtggcgtgaaaggcattcgtccgggcgcgtactgtgaaccgaaaatgacttctgtaggttcccaggacaccaccggcccgatgacccgtgatgaactgaaagacctggcgtgcctgggcttcagcgctgacctggtgatgcagtctttctgccacaccgcggcgtatccgaagccagttgacgtgaacacgcaccacacgctgccggacttcattatgaaccgtggcggtgtgagcctgcgtccgggtgacggcgtcattcactcctggctgaaccgtatgctgctgccggataccgtcggtaccggtggtgactcccatacccgtttcccgatcggtatctctttcccggcgggttctggtctggtggcgtttgctgccgcaactggcgtaatgccgcttgatatgccggaatccgttctggtgcgcttcaaaggcaaaatgcagccgggcatcaccctgcgcgatctggtacacgctattccgctgtatgcgatcaaacaaggtctgctgaccgttgagaagaaaggcaagaaaaacatcttctctggccgcatcctggaaattgaaggtctgccggatctgaaagttgagcaggcctttgagctaaccgatgcgtccgccgagcgttctgccgctggttgtaccatcaagctgaacaaagaaccgatcatcgaatacctgaactctaacatcgtcctgctgaagtggatgatcgcggaaggttacggcgatcgtcgtaccctggaacgtcgtattcagggcatggaaaaatggctggcgaatcctgagctgctggaagccgatgcagatgcggaatacgcggcagtgatcgacatcgatctggcggatattaaagagccaatcctgtgtgctccgaacgacccggatgacgcgcgtccgctgtctgcggtacagggtgagaagatcgacgaagtgtttatcggttcctgcatgaccaacatcggtcacttccgtgctgcgggtaaactgctggatgcgcataaaggtcagttgccgacccgcctgtgggtggcaccgccaacccgtatggacgccgcacagttgaccgaagaaggctactacagcgtcttcggtaagagtggtgcgcgtatcgagatccctggctgttccctgtgtatgggtaaccaggcgcgtgtggcggacggtgcaacggtggtttccacctctacccgtaacttcccgaaccgtctgggtactggcgcgaatgtcttcctggcttctgcggaactggcggctgttgcggcgctgattggcaaactgccgacgccggaagagtaccagacctacgtggcgcaggtagataaaacagccgttgatacttaccgttatctgaacttcaaccagctttctcagtacaccgagaaagccgatggggtgattttccagactgcggtttaaaaagtcagcgcacgcgctgcgcataaacgacacaatgcccggtgaatgagattcccgggcatttttttatttctaaaccatcgccgttccgctgtttttctccggtaaggctgcgataattacatcaatggcgcaatgcgatttcggtgcattgccgggagcagaggaacacactatggattacgaatttctgcgcgatattaccggagtggtaaaggtgcgtatgtccatggggcatgaagtggtcgggcactggtttaatgaagaggtgaaagaaaacctggccttgcttgatgaagtggaacaagcagcgcacgcactgaaaggtagcgaacggtcctggcaacgggcagggcatgaatacaccctgtggatggacggtgaagaggtgatggttcgcgccaatcaactggaattcgctggcgatgaaatggaagaggggatgaactactacgacgaagaaagcctgagcctatgcggcgttgaggattttctgcaggtcgtggcggcttaccgcaatttcgtgcagcagaagtaaataaatctggcggagcctgggagctccgccagagccgttaaacagctggcatattgcgcccgtaataaatctcgcgcatttctttccacagcgcagcggtaatttcctggcgctcgctgtcggttaagtcttccggtttggtgtggaacatgtagtgcttaaggtcgaactctttaagcaacatcttggtatggaagatattttcctgatagacgttcacatccaccatgtcatacagcgccttcatatcgtcagacataaagttctgaatgctattaatctcatggtcgataaagtgcttcataccgttaatgtcgcgggtaaaaccgcgcacgcgataatcaatggttacgatatcggactcaagctggtggatcaggtaattcagcgccttcagcggagaaatcacgccgcaggtagagacttcaatatcggcgcggaaggtacataaaccgccttcaggatgactttccgggtaggtatgtacgcaaatatgacttttatcaagatgggcaacgaccgtttctggcagtgggccggggtgttctgttttgtcgatgagtttcgggtcaaccggttcttcactcaccagaatagtgacgctggcaccctgtggttcgtaatcctggcgggcgatgttaagaatattagccccgataatggaacaggtttcactcaggatttcggtcagacggttggcattatagagttcatcgatataagcaatataaccgtcgcgctcttcggcagttttggcgtagcagatatcgtaaatacaaaaactcagacttttggtcagattattaaagccatgcagtttcagttttttcaatttcttatcttctccttaggacggctgactagccagtgcgtcttgcagatactgaggtaaggcaaaagctgccgtatggattgccggattgtaataacggcatttcaggccagaggcgagaaaacgcgcctgaataatttcggtactgagatggcgtaaggcgtcgttatctgtcgcccatgcaaaagtcatgataccgccgtaataggtcgggatcgccgcctgataaaagccaacgtcgctgaagtaatggctgagtttgcgatggctgtcgatggcttcttcctgctgtaaaaagcagacgccgttttgtgcgacgaagataccgccaggattcaggcaacgtttgcagccttcataaaatgcgctagtgaaaaggctttcgccgggaccgataggatcggtgcagtcggagataatgacatcaaaggtctggctggtttgattaacgaaattgacgccatcgtcgatcaccagcttaaagcgcggatcgtcgtagctaccggcgttatggttgggtagatactgacggcagaagcttacgacacccgcatcgatttccaccatcgtgatactctcaacgtttttatgtcgggttacttcacgcagcatggcaccgtcgccgccgccgataatcagcacatgtttcgcgtgaccatgggccagtagcggaacatgggtcatcatctcatgatagataaactcgtcgcgctcggtggtttgtactacgccatccagcgccattacgcgaccaaatgcagcgttctcaaaaatgatcagatcctggtgatcggtcttttcatgatacagaacgttatctaccgcaaagtactgcccaaactggtcgtgtagcgtttcatgccactgttttttttcggccatgggttgatacctcctttgttaacacccgtaaaaaaagggcgcaacataatagctaacattgaccgcggatgcacggtcaatatttctacaaaaaggtatcagggattatttgacgtaggcaagcaggcttaaggaatcgcgggccagggctttgcattttttagcgacgggaatgccaatgccgctgagatcgcggtagctgtcttcaccgagggctttcatgtcgaaggtgtcgtaattactgaggtcccactggttttgctgagcgaaaaagaccagtgcgcgacgaatttgcccgttaggtaagttctggtaaccacaatcgttcttcagaaagacaaaaactgccgttaaatcggccatatcttcggcttcagactcgctgagcgcgtaactgtttgcgcagacggccatcaggctgccgaataacactgttctgaaaaacgtcttcattgcttctaccaggggcttaaagaagataaacgttagcacactgcgagcgaggcgacgaccattattgtcgattaaattgtgtctgcggcttgaccttcccgtaaggggaaggactatgctcaacgtttgattttgtttcgcctgcttaagaataaggaaataactatgcaacgtcgtgatttcttaaaatattccgtcgcgctgggtgtggctagcgctttgccgctgtggagccgcgcagtatttgcggcagaacgcccaacgttaccgatccctgatttgctcacgaccgatgcccgtaatcgcattcagttaactattggcgcaggccagtccacctttggcgggaaaactgcaactacctggggctataacggcaatctgctggggccggcggtgaaattacagcgcggcaaagcggtaacggttgatatctacaaccaactgacggaagagacaacgttgcactggcacgggctggaagtaccgggtgaagtcgacggcggcccgcagggaattattccgccaggtggcaagcgcagcgtgacgttgaccgttgatcaacctgccgctacctgctggttccatccgcatcagcacggcaaaaccgggcgacaggtggcgatggggctggctgggctggtggtgattgaagatgacgagatcctgaaattaatgctgccaaaacagtggggtatcgatgatgttccggtgatcgttcaggataagaaatttagcgccgacgggcagattgattatcaactggatgtgatgaccgccgccgtgggctggtttggcgatacgttgctgaccaacggtgcaatctacccgcaacacgctgccccgcgtggttggctgcgcctgcgtttgctcaatggctgtaatgcccgtagcctcaatttcgccaccagcgacaatcgcccgctgtatgtgattgccagcgacggtggtctgctacctgaaccagtgaaggtgagcgaactgccggtgctgatgggcgagcgttttgaagtgctggtggaggttaacgataacaaaccctttgacctggtgacgctgccggtcagccagatggggatggcgattgcgccgtttgataagcctcatccggtaatgcggattcagccgattgctattagtgcctccggtgctttgccagacacattaagtagcctgcctgcgttacctagcctggaagggctgacggtacgcaagctgcaactctctatggacccgatgctcgatatgatggggatgcagatgctaatggagaaatatggcgatcaggcgatggccgggatggatcacagccagatgatgggccatatggggcacggcaatatgaatcatatgaaccacggcgggaagttcgatttccaccatgccaacaaaatcaacggtcaggcgtttgatatgaacaagccgatgtttgcggcggcgaaagggcaatacgaacgttgggttatctctggcgtgggcgacatgatgctgcatccgttccatatccacggcacgcagttccgtatcttgagtgaaaatggcaaaccgccagcggctcatcgcgcgggctggaaagataccgttaaggtagaaggtaatgtcagcgaagtgctggtgaagtttaatcacgatgcaccgaaagaacatgcttatatggcgcactgccatctgctggagcatgaagatacggggatgatgttagggtttacggtataaaaagaccgtattcggaaatatgcccggatctctccgggcattaaactgatgacaaacgcaaatctgcctgatgcgctacgcttatcaggcctacgctagctgtgcaatccattgattttgcacaattttgtaggctggataaggcgttcacgccgcatccggcatgaacaacgcgcacgttgtcagcaatctgagcaagtcttacttcacatcatccggcagcgcataagccacaatatagtcgcccatcttcgtaccaaaactaccgtgaccgcctgcggagatcaccacatactgcttaccattcacttcataggtcattggcgtagcctgaccacccgctggtaaacgaccctgccacagtttttcaccgttgctcatgttgtaagcgcgcaggtagttatctgccgtagcggcgataaacagcacgttacccgccgtggagattggcccgcccagcatcggcatacccatattgaacggcaccggaaccggcatcgggaacggcatactgtcctgcggcgtaccaatacgtttcttccacaccacttcattagttttcagatccagcgcgctgatataaccccatgctggctgtttacatggcagaccaaatggactgaggaacgggttgagcgtgacaccatacggtacaccgtactgtggctgaatgccggattccgtacccgtgcctttggcatctttcggctgctccatcgggttgccaggaccacgcgggatcagtttgctaacaaacggcagtgccattgggttggcaatcgccacttcacgatttggatcaacggaaatcccgccccattcgaacatccccaggttacccgggaagaccagcgtaccctgttcagatggcggggtgaaaatgccttcatagcgcatctggtggaacatcacgcggcacaccagttggtcaaacatggtggctccccacatatccgcaccgctcaaatctttcgtcggacggaagctcagttcagaaaacggttgagttggggttacgtaatcgcctttcgctgcaccttggggaaccggtttttccggtgccggaaccaccagttcgccattacgacgatcgagcacaaaaatgttgccggttttcgccggagcgtaaataactggcactttctgaccattaacggtgatgtccgccagcgtcggctgtgccggaagatccatgtcccacaggtcgtggtgaacggtctggtagctccacgccagtttcccggtagtggcattcagcgccagaatgctgctggcataacgttcctgttccggtgtgcggttaccgccccagatatccggcgtggtcacgcccatcggcagatagaccagatccagcttcgcgtcataggccgctggtgcccaggagtttgggctgttaaaggtaaaggtgtgttcgtcagacgggattgcgttcggatctttcgcgccgggatcaaaagcccacagcagctccccggtgttgacatcaaaaccacggatcacgccagacgtttcgcgggtactgaagttatcggtaacactaccggccatcacgatggttttatcggtgataatcggtgggctagtcggttcatacagacccggtttggtgtctggcatattgctttgcagattgagcacgcctttattggcgaaggtttcgcacagtttgccgttttcagcgttaatcgcaatcagtcgaccatcattgaccggaagaatgatacgacgcgggcaatccgccatcacttccgggctagcggtttctgctttggcttcatgataagagacaccacggcaggttacgtgctggaaagactcgttggttttcagctcaggatcgtaatgccatttctctttgccgctggcggcatcaagcgcaaacaggcgctggtgagcggtacacaggtaaagggtgtcgcccactttaatcggcgtcacttcattggtgatttcacccggatcgttcggctgcttcacatcgccagtacggaacacccaggcttctttcagattatggacgttatcggcgttaatttgtttcagcgggctaaagcgttgaccttcctgattacgaccataggcaggccagtcctgatcggctacgggggagatagcttcagcaggtgtggcatcggcgcttaaggtgccgttgatctcctgcggatcgttaaatccggcccaggtcaggataccaccgctaatcagcagtgcgaccaccagtgcggcaactgcgccgctggcaggaatgaccaggcgacgccagacaaacggcaggatcagccagatgccgaagaagaccagaatgtcgctgcgcggagtcagcgcccagaagtcgaaaccaacttcccagacgccccaaatcatggtgccgagcagcagggctgcgtatagccaaagcgcggcgcgtttactgcgccacagcatccaggcgacgccgagcatcacaaggccagcgatagggtagtaccaggagccgccaatcgcgaccagccagcctccgccaatgagtagatacagcccgcaaagcgctgcaaaaagggctgttagcgtgacgagtaatcgtcggctgcctgtattgttaattgccataaagagacaccatttcaattcattaatattttagtagcaattaattataggttttaacatgtgtgatcgtcatcacaattcgagctttattaacagattccgcgaatgaatagttttactggtatactgcgtgtcttgcgctttgttgcggtgccaaaacctgcccgtgcgaagtgatttgtttttaaatcatatggttagagatatgaaacatactgtagaagtaatgatccccgaagcggagattaaagcgcgtatcgccgaactgggtcgtcagattactgagcgttacaaagacagcggcagcgatatggtgctggtgggtctgctgcgtggcagttttatgtttatggcggacctgtgccgtgaagttcaggtatctcatgaagtcgactttatgaccgcctccagctacggtagcggcatgtccaccacccgtgatgtgaaaatcctcaaagatctggatgaagatatccgtggcaaggacgtgctgattgttgaagatatcatcgacagcgggaatacactgagcaaagtgcgtgagatcttaagcctgcgcgaaccgaagagcctggcgatttgtacgctgctggataaaccgtcccgtcgtgaagtgaacgtcccggtagaatttatcggtttcagcatcccggatgagtttgtggtgggttacggcattgattacgcacagcgttaccgtcatctgccgtatatcggcaaagtgattctgctggacgagtaagtgtgaagttgccggatgtgttgcatccggcatggcatttttatttgtggttggcgtgtttcagcttgaggttggaaatcccgtgacggtaacgttgctcaagggtttcgcggttggtggcggtaacatccagatcacgcagcaagccgtcgtgaatgccgtaggcccagccgtgaatggtaactttctgcccgcgtttccacgcactttgcataatggtggagtggcccaggttatacacctgttccatgacgttcagttcacacaaggtatccagacggcgctcttgcggcatttcgccgagcaaactgctatgtttgaaccagatatcgcggatatgcagcagccagttgttgataagccccagttccgggttttcaactgcggcttgtacgccgccgcaaccgtagtggccacagataataatgtgttcaacttcgagtacatccactgcatactgaaccacggaaaggcagttcaggtcagtgtgaatgaccaggttagcaacattacggtgaacaaagagttcgcccggttcaagaccggttaaacgttctgcaggaacgcgactgtcggaacatccaatccatagaaagcgcggtttttgcgcttgtgccagtttctcaaaaaacccgggatcctcttccaccagcattttactccatagtgcattgttgctgatgagtgtatctatgtctttcatggaggttaacgacctgtaaccaaataattacgtttggctaatatagggcaactccgggacgatttaaaccacagataaagtgtaagaacgtaaggtaagtaaaaatttatgaccattgcactggaacttcaacagcttaaaaaaacctatccaggcggcgttcaggcgcttcgtgggatagatttgcaggtcgaagcgggtgatttttatgcgcttctcgggccgaacggggccgggaaaagcaccactatcggtattatcagctctctggtaaataaaacctccgggcgggtcagcgtatttggttacgatctcgagaaggatgtcgtgaacgctaaacgtcagttgggactggtgccgcaggaatttaacttcaacccgtttgaaaccgtgcagcaaattgtggtgaatcaggcagggtactacggcgtggagcgcaaagaagcgtacatccgcagcgaaaagtatcttaaacaactcgatctatggggaaaacgcaacgaacgtgcgcgtatgttatctggcgggatgaagcgccgtttaatgattgcccgtgcgttaatgcatgaacctaaactactgattctcgacgaaccgaccgcaggcgtggatattgaacttcgccgcagtatgtggggctttttgaaggatttaaacgacaaaggcaccaccatcattctcaccacacactacctggaagaagcagaaatgctgtgccgcaatatcggcattattcaacacggtgagctggtggaaaataccagcatgaaggcgctgctggcgaagctgaaaagcgaaacctttattctcgatctcgcaccgaaaagcccgttaccgaagctcgatggctatcagtatcgactggtcgataccgcgacgctggaagttgaagtgctgcgtgagcaggggatcaacagcgtatttacgcagttaagtgagcagggcattcaggtattaagtatgcgtaacaaagctaaccgtctggaagagctgtttgttagtctggttaatgaaaaacaaggagatcgcgcatgatgcatctttactgggtggcgctaaaaagcatctgggcgaaagagatccatcgctttatgcgtatctgggtgcagacgctggtgccgccagtcatcaccatgaccctttactttattatcttcggtaacctgattggtagccgtattggcgatatgcatggcttcagctatatgcagttcatcgtaccggggctgatcatgatgagcgtgatcaccaatgcctacgccaacgttgcgagtagtttttttggtgccaagttccagcgtaatattgaagagctgctggtagcgccggttccgactcacgtcattattgccggatatgtcggcggtggcgtggcgcgtggtctgtttgttggcattctggtgacggcaattagtctgttttttgtgccatttcaggtgcatagctgggtattcgttgccttaacgctggtgctcacggcggtgttgttctcccttgcgggtttgctgaacggtgtgtttgccaaaacgttcgatgacatcagcctggtgccaacctttgtgttaacgccactcacgtatttgggcggggtcttttacagtctgactttgttgccgccgttctggcaagggctgagccacctgaacccaatcgtttatatgatcagtggtttccgctacggcttcctcggtatcaatgatgttccgctggtcactacctttggcgtactggtggtctttattgtggcgttttatttgatctgttggagcctgatccaacgtggacgtggtttgcgtagctaaggctatttcctctcctctggatttgggggagaggagttttgacggctatcaccctttatcaacaatggtcagggtagactgattttcggctaaggaggaaggcgatgttaggttgggtaattacctgtcacgatgaccgggcgcaagagatactggatgcgctggagaaaaaacatggggcacttcttcagtgccgggccgtgaatttctggcgcggattaagctctaatatgctcagccgcatgatgtgcgatgctctgcatgaagcggactctggtgagggtgtcatcttcttaaccgatatagccggagcgccaccgtatcgcgtggctagtttattaagccacaaacactcccgttgcgaagtgatttctggtgtcacgttaccgttaattgaacagatgatggcttgccgtgaaaccatgaccagtagtgagtttcgcgagcgtattgtcgaactgggtgcgccggaggtgagtagtctttggcaccaacaacaaaaaaatccgcctttcgtcctcaaacataatttgtatgagtattaacccgcgattctgatggcgcttttgctacaataaaagcgttgtttcaccctcggttattttttcatgtacaaacaagctgttattctcctgctgatgctgtttaccgcaagtgtcagtgccgcgttacctgcccgttatatgcaaaccatcgaaaatgctgcggtctgggcgcaaattggtgacaagatggtgaccgtggggaatattcgggccggacaaatcattgccgtggagcccactgccgcaagttattacgcatttaattttggctttggcaaaggttttatcgataaaggtcatctcgagccggttcaggggcgacaaaaagttgaagacggtttgggcgacctcaacaagccgctgagtaatcagaacttagttacctggaaagatacgccggtctataacgcgccgagtgcgggaagtgcgccatttggggtactggcggacaatttgcgctacccgattttgcataaactgaaagacaggttaaatcaaacctggtatcagatccgtattggcgatcgactggcctatatcagcgcactggatgcccaacccgataatggcctgagcgtgctaacctatcaccatattctgcgcgacgaagaaaacacccgttttcgccatactagcacgaccacaagcgtacgcgctttcaataaccagatggcctggctgcgtgacaggggatacgcgacactgagcatggtgcagctggaaggctacgtgaagaataagatcaatctccctgcgcgagcggtggtgattacctttgatgatggcctcaagagcgtgagccgctatgcgtatcctgtgttgaaacaatatggcatgaaggcgacggcgtttattgttaccagtcgcatcaaacgtcacccgcagaagtggaacccaaaaagcctgcaatttatgagcgtttctgagcttaacgaaattcgcgatgtatttgatttccagagtcatacccattttttgcatcgggtagatggttatcgccgacccatattactgagccgtagtgagcacaatattctgtttgattttgcacgtagtcgccgcgctctggcgcaatttaatccgcatgtctggtatcttagctatccgtttggcggatttaatgacaacgccgtgaaggcagcaaacgatgccggatttcacctggcggtgacaaccatgaaaggcaaagtaaaaccgggggataatccgttgttactaaaacgactttatatcttaagaacggatagcctggagacgatgagccggctggtgagtaaccagccgcagggataacaatcaagcaacctgtaccggaatcgctttcgcggtacgtttcatttcattgtcgccttcaaaataggcgacgttgggtcgccaggtgcgagcttcttcatctggcatggtaacgaagctggcgatgatgacaatatcgccgacactggcgcagtgggccgccgcaccgttaacagaaataattctgctaccgcgttctgccgcgatggcataagtggagaaacgcttgccgttggtgacattccagatatcaatggcttcgttttcgagaataccggctgcgtcaagaaaatcctggtcaatggcgcaagaaccttcatagtgcaggtccgcatgagtcactttcacgcggtggagtttgccctgcagcatcgtgcgaatcataacttctacctttctaccctgtcgttaacgaagcaggcgatgcctgctttgaggaaattctcacgcagtattgcccgatttttgtttagtgtctactcatctgacggcatttgcgtcagcagtttgcgtaccgcgccgaagcgtgccatgtatcgcctgtaacgaattgatatttctctgaacgctgctcggtaaacaataaagaggtggctgacgatagcgcgccttgactggatactgccttcacgcaaagccacacggaagacagggaagatggatgcaccgagtaccacaccgcatgacgcggtatttaaacaatttttaatgcatgcggagacggctcgcgactttctggagatacatttgccagtggaattacgcgaactttgtgacctcaacacgcttcatttagagagcgggagtttcattgaagagagcctgaaaggacacagcacggacgtgctctattccgtgcaaatgcagggcaatcccggttatctgcatgttgtgattgaacaccaaagcaagccggataagaaaatggcctttcgcatgatgcgttattctatagccgccatgcaccggcatctggaggctgaccacgataagctgccgctggtggtgccgatactgttttatcagggcgaggccacaccttatccgctaagtatgtgctggtttgatatgttttacagcccggagctggcgcgacgcgtctataacagtcctttcccgctggtggatatcaccatcacaccggatgacgaaatcatgcaacatcggcggattgcgattctcgaactactgcaaaaacatattcgccagcgcgacttaatgttattgcttgagcaactggtcacgctgatcgacgaagggtacactagcggaagtcagttagttgccatgcaaaactatatgctgcaacgcggtcatactgaacaagcggatttgttttacggtgtgttgagagacagggaaacgggaggggagtctatgatgacgctggcgcagtggtttgaagagaaagggattgagaaggggattcagcagggaagacaggaagtaagtcaggaattcgcccagcgtcttctgagtaaaggaatgtctcgggaagacgttgcagagatggcaaatttacctcttgctgagattgataaggtaattaaccttatttaagttacctgtgttatgacagatgacgtggggtaaattaataactggcgccatcagccgtagcgccagttaagtattacgccagctcgaccattttgttgtcgatcaggcgagcatcgccaagccaggcggctaccagaattactgcccgtttgctggtttcagaaacttccagcaatgtgtcggcatcgcgaatctgaatatcatcggcgcggaagcctttttcattcagttcttgccccgcaatggtaataatttcatcgagatcccgttccccagcctgcaatttgtcagcaatgctacttaaaactttgtacagaccaggcgcaattttgcgttgttccgccgtcagataaccgttacgggaacttagcgccagaccgtctttggcgcgcataattggcacaccgacaatctcaatatcgaagcccatatcggcaaccattttgcggatcagcgccagttgctgaaaatctttttcaccgaagcaggcgatgtccggctggaccaggttgaacagcttgctgacaatagtgctaacgccgcgaaaatgtcccggacggctggcaccttccagcatggtgctaaggccaggaacgtcaacgtaagtgtgggtttcagtaccgttcgggtagatctcttttacgctaggggcgaaaactaaatccactttacgtttgtttagcttctcgcagtcctcctgcaaggtccgtggataacgagccagatcttccgggcggtcgaactgcatcgggttaacgaaaatactgacgacgaccacatcggcgcgggctttggcttcgtcgaccagcttcatatggccatcgtgcaggttacccatggtaggcaccagcgccacgcgcttgccttccatacgcaggcggcgaatttgctgacgcagcagcggcagggtttcgataattaacacaacgtgactccttaatggaaactgtgttcttcgcccggataaacgccggactccacttcagccatatactgccgcacagccgcgcggatgtcgcccgtttcggcgaggaaatttttagcgaatttaggaatgtgaccgccggtaataccaaaggcgtcgtgcatcacgaggatctgcccgtcagtgacgttgcctgcgccaatgccaataaccgggatcgccagtgcttcggtaatacgttttgccagttcaaccggcacgcattccagcaccagcagctgtgccccagcagcttctaaggctaatgcatcgctgagcagttgatcgcccgcttcatcgccgcgcccctgaactttgtagccaccgaaaatattcacactctgtggtgttaaacctaagtgaccacatacaggaacggcacgttcggtcagcatttgtacggtttctaccagccactcaccgccttcaattttgaccatgttagcaccggcacgcataaccgttgcggcgttttcgaaggcttgttccggcgtggcatacgccataaacggcaggtcagccagcagcaggcagtttggtgcgccgcgacgtacggcggcagtgtggtaggcgatatcggcaacggtaactggcagggtggagtcgtgcccctgaaccgtcatgcccaggctatcgcccaccagcatgacgttaagcccttcatcagcaaagagtttggcgaagctatagtcataagcggtgatggtcgcgaaacgttttttttcctgtttgtacttctgcagtaaggagatggtggtcggtttcataacgtatcctgataaattgatgttgtgctgtctggcattttatcagtcacattggtgggggcaatgatttatccgtagcagcactgccagaaggtgacagtgctgctacgttatcagggataggttacctggaaagtactggtggctttaaattcgccgggttcgatagcaatattcccgtcttgctttaatgttgcctggaaatgaagaggctgacttgtgccgttaccttgattagggtaaaccccatcggaggtgtcatcttcggtttcataatctatataaacagaattcgtatcattaggttttaatgtcattagcggatttttactggttgctaaaccttcaatgagtacgccaacgcctttggcggcagtgcttccagtaagcgtattaccaagcagttgtgtgttttgagtacctacttttccagtgacgagttttgtttcaatattacgcacacgaatacaattctgaaggctgatatcaaagggaacaggactagcgccatttttaattgtcccagagctatattctcccattctaaccgtactaccattgacacttggcccggtaagtatggaggtaaaacatgttggtaaggttaatttgacattattcagtgtgaaattgacataaatgtggttgctgtgatctacaacttttgtaccaggactgtaggccttaaagctataaaggtaattactactactggataactggacttgctgattaagtgtaggatcgaaattagtatctgtataaaattcaacagttatgttgtgtactataccaccaatagcccaaaacttatcgtagtcgtctgctttgttgcaacccttagtttgtagatcgctgtctgtgacggaaaagaaaaattcttggttggaaggatctccgatatagattcctgggctttgaatgtcagttattgtatcgtatgcagaccagaccctacttattaacatggtgtaatacagaccaggaacagatgtattaaatagtttatgtccgccataatctttaccactatagaccatggcattttcaatagttattggaccaggattcgctctgccagatgtattgcagtaaagaataccaccaccggtacctgtatccaggtaactccagtacatttttaccccagtcgggccgagctgcgtgggtttataaaaaaccaagttgcttgctgtacttgtgtaattaaaggtcatctgtgcggcagtggaggggcctcgatagttatcaactcctgcattatttcccacaataaaacttgtatatgcactgactgtattacaacaagaatacagtgctaaaaaaagaatgtacctgaagatagtcttcatttttactccaatgtttctttattgttatggtttgcgctgtttttgtttgttattcgtagtaaatatccactaacacatggctcataagttgaccagatgtaacactcaatgcaggatcgattttttgcattcgggtgctaaatttccaggaactaccattcatgtcatcgctcattactggataaacggaacgagatccgccactagcattaagaacattgaatgtattcgcgctatcctgagtagaaaatataactactcctacattacttgctccactgctaatttcattagcaaatatttgcctagagccagcagccatgacaccgctaagggctctaaaatcaatatgtaactgatttagcacatcgccagttccctgtaatgcacagtcggatacagtgatagtgaactcttttccacctggttgataactttcaggagtaacattaccactaaaatatcccaccccaacgacgccaagatcaatattaccctggttactgattccgcttttgcaggtgctgttttttacattggcaacaaggtcaatatcctgtccagcaatggctggacaggcgatgcaaaacagtaaactcagaaacagaattattctcttcatcagcttacgttgagtgggatgcatatatagttcctgaatctgtaagtctgttagttataggttactgtaaatgtggctggtgcagaaaacttacccgcagtgacattgtttacggttttatttttttccacgaccaggcgtgcactcatcggataataaacgaccgcattggctgcagtggagattgttacctcttgacttgctggtgttacacagctaaattgtgttgcactccctgttgccggagttacagtgctccagacttcaacggcgacagcacttgctttatctgcggctgtggaaccatttgcaaaccccgcaccgtcattagcagttccctcgcatgtggctcgcttggttaattttatttgcgcttttttattggggatacccgcacagtctttgaatttgagtttgaatgtttttactttggtcttggcattgatttcagaaatatatacatcaccaaaatcaacaacagaaatgtcctgatcagagtcatttactaatgtagcggtacaagtacccatttctacagtagtaataacggtcagtccaatactgtctgttgccgcataagagagtacgctgaacaaactggcagccaaaacgacactgctggataatccataacgtaaatttttaaatgtcatcataattatccttcttattgatagatgaaattaaacgtcgccagtgcacgaaaattccccggtacgccttgccctgcatctgtttcacgtagcgcaacggtcatttcaagacccttatcgggctgcatctcgtctgtgctccagcgtatcttttccgcactgttaggtttaaggaaagtggcatcatcagtagtccgttttttgaaacccataccgatattacttgtcgtgctagaactatcaccagactgcggtataataagcttaggactgctactacttgcatttccggtcagagtggtatcaatccaactgatgccactgctgcacccactggcaaccagtttaaaatcagcctgagattctgtcgttttattcgcgatcttatccagacccatcttagggattctcaatgtgtagttattattgccatcattcgtgacgttattaccagtaagtgtgatgttacaggttgtcgctttgacagtggctgtaaactctacattaatatccgttgcaaatacactgggacttaataatattcccatcagtatcactattttatgtggcgttgtttttatcatttgacgtcccttgtagttactgaatctgacaccgaattccattcagaataatagattgtgctattttttctgcttctgggctttgttgataatgcgcaagacaacttacgggtttactttgttcgagccatttaatgctgatatttccctgctgctcaataccacgaacaaatgcttgtccaccctgtccaacattaccaatgacattgccttgctcatcataaatatctgcagcaaatggaatatttttaccatcacttcgtgtgatgttcataatggcactttgcccttgcacggtttcaaaatcagcaaagacgacactaccctgacgcggtacagctactgcactggtactttttaattcaacatcgttctcaagatcgttgatatccagcgcgatacggttttcatgataaggagaaagagcgctggtgacaccataaccccatcgatcgatagtactgttgccataatttattcgcgctccttgagcacctggagcctgaactaccgccagtgtatcggagtcgctaaaactatcattactgaaagtcagtccaccgctatgcaatacaaaaccaccgtcggtgctgagagaaacttgacggctgttatcgctatttgcagaaatactacctgccagcgttccccatggactctcatagctggcataacccccaacataactcaaatctttgctggctttattcatcgtatagccagtattcacgctataactgacgcgagcgttatcgctatagccactgctgctaacgttgagttggttattacccttaaagtcactgcttatttgagtatcaatactctggaaaccactagtacgttgttcagtgccaagtaatttttcaattggaatggtgaaactaagataaacgctatcgtcagtgtcgccgtcttcattccaactacgctgggcactgacactgtagctgccccaggatgtactgttactgtagccaatagagtaattgctacgattttgtccggaagcccagtaatcggaccaacttccggaaagataaaaactaccgtaatcttttttctcaaatttcaacggttggttaatactgaccgtaacctgatttttcatgcgactgtaattacgcatggatttcggttcaagatcttgttcgggatgtttcacttcatcaattagagttagtgcatcattaagaccaaggtaattctgtgtgctatagcgataggccgcgatattcagactagtacttgtttcttcgaataacttgttccaggaaacacgataactttgcccctggtatgttttatcatccgggatacgaacattggaatgagtcacatcgaaagaaaatgcaccaacactagtattcagaccaagacctaacaaaccagcggtatagttattatcggttatctgaataccggtataacccgtcagatagttattcaggccgtagtagtagcttgcttgaaataaattaggctcatcctgaatatcatcttttaagacctgaccgccgctaatatcccaacgtccaacgccagggcgtaacatttgaacaacggaactgaaaggttggctgaatgtccgcttactgccatcggattcttcgatggtaacaataagatcgctgccgtacccactcggactcagatcatcaatgacgaaagcgcctggcggcaccgtcgtttcataaatcttatagccaccttgcgtaatagtgactttggcgttggtattggcaacgccatgaatgataggcgcaaagctggctaaagtcggaggcaacatgcggctgtcactgtataaacgaatgcctcggatactgacggaatcaaaggtttcgcccgtcgtataagactcaccaagaatgagttgagaacgcaggctggcgatatcacgctgaacataccgattcttaaaatcataattactgccagaatcggtcatccagttgtagttgccgctggcacgcagtcgccatgcacctaaattcatcccaccgttaaatgcagcataaatgctttcattttttcgaccaggggtttcactatgatatccgttgaggttgtaactcaacatggccgcattaatgccgttttcccataagcttggatcaacatagttttggtaatttttcattacccaggcttgaggaacgtctatatccagacgttgatcgttaacgtcataacgaacagaagcctgagggataatttccgtcaaattgaggcaattgccgagcgtttcatccctggcaagcagaacggctttttcgttatttatatcgggagaattaatatgaaactgcaataaattctttaatgtgatacaagcctgggcgttcttttttccttcaattgcgacaaatgtaatactttggttaatgattggttggtcgtttacataaacactgacgtcgtaaacacccggtatagcggggttaccttcactgtaccggctgagatcaatattagatgcattctgccccatcaggaaggtatggtcatattcaacgagttcagcactgaaagcagtattgcaatacagcagcgcgcaaaacgtggcgatacgggtcagatgatgataatttttagtatattctatagtcacgctatgcttcctgcggaattatatccttgcctgattacagcctggcattaccttcaattgcgccaccaaagtcattaatggcgtaaaaatgcacttttgcagaattcgctttgccattaaggccattgactttcatgacctcatcactaaatggtgcaatcattttcacatcaatcggatagcgtttaccgctagcttctaaatcaccactgctaaaagagacgtagtaaggggttggattggtcactcgtaaactcgccttaccttcactaccactccagaaccacttcagggctaacggggcttcagagggatttcccttcaatccatccgggcgatagaaaagttttatacgtgtgcgaaatgccagttgcagcaggctttgattcgcgaccttttctgcatctggttttggtggaacttccagtacgttaaaccagaacacgctctctctgtctttaggcagactggtgctggctgtgtacattaatttgattgtttgcccacgtttggcatcaatacggcttactggcggcgtagcagtaaaagggactgtaatactgccaggctcagcgttgtcatcgccagtatctaaccaactctggacaagcaacgggttattccctttattttccagacgtacgttgacacttttttgatcgcttttatatattacgcgagtaccgctaatgacaatgtccgcaatagagctactactaaaagccatacaggttacgaagcataaagctgttgtatgtttggtgttaaaaaacataaaccatccctgatagagttaattaaaacagggaataatataaaatagaaattattattccctgtatattcattcaatcaatttaactggtgaatacttactgataagtaatggtgtatgcagtgttagtttttacataaccagcagttgctgtttggtctgcgacggcacgaacgtaagacgctttaaaatcataaacagcagattttgtcgttgcatccagggctttagtatacacatcgccagggttgttaatttgaacctgtttgatagtggaaccatcaatattgtgtagagcgatattaacgccgtcagatgggttgttaatagacatgtcgttgttcaaagtccctttgctgttaccaaagaaaacagaaccgaaggtcattttagccgtgctacctggattcggatttgctttgctgcagtcaacggtgatgctgaaaggtttagctttagcgccaacggtgtcattcagtacgccagcatcgatttcaccaacggttgcggtttgcagcaggatcagaccatccttgttaccgccgtcaacgcgggtttcacaggtgttatcaacaaccagaccactgatatttaactgaccgccgtccatatcagcagaagcagtacctgcaaccatcgccagcataagaccagacagggcaaaacctaattttttagacataaaaatcctttaataaaattccattagtcagactacatgtttgaagaatgactattcatgacacaaataggagaaacaaatgttagatattaatgagcaatgatatttgttacccaaatttacaaccattgttcattaggtcgcctattgtgcactttagaagcttttgaacaaattaaatttacttaattcaaaattaagtaaaaataagttcacaagtgcaattggttagggtatggagatgggattgatatttatttataggaagttatattatttccgcaaagagatgtttaaactaaaatcgtaattaaggaaagagatgagatatgattttcagaaaatatttatattcgcaatataaataaattaccatttgtttaatttgtcaaatgctcttgtatgtaagatttgacgcaacatctccccatcaggaaacaccaactccggcgcgatttcaaacagcggccacagcataaatccacgattcttcatatcgtagtgcggaacggtcaggcgttcagtatttatcacttcattaccaaacagcatgatgtcgagatccagcgtgcgtggtccccagcgttcagctttgcggacgcgaccttgctgcaattcaatacgctgtgtgtgattgagtagctcttcaggtgcaagagaggtttccagcgccacggctgcgtttaagtaatcgggttgatcttgcggccccagcggtggggtgcggtaaaagctagaaacggtaagaatgtggctttcagggatatcgcctaatgctttcagggcagcattgacctgctccagcggagaggccagattgctgcctatggcaatatacgccactgtcatgcggtaccctcacgacgtggtgcgcgtttgcgtggacgacgagtacgacgacgcggactcggttcttcatccagctcgttgagcatccctttttggtctggtggcgcggaaacctggaactcaccccaccatttcaccagacgctgcagttcagcgttacgctcaacttcagctcgcaaggccaacaggtcataagccgcacggaacttaggatgctccagcagtttccatgcgcgtttaccctgacgacgggacatacgcaactgcaactgccagatatcgcgggttaatgtcgtcagacgtttcgggattgccagactacggcaggcttcgtccagcacgtcgttcatcgccagcgcgaaagcgtcgtgataggtcaggccgctttcctgggcgatcttctgtgccgtctccagcagtgggtaccagaacatggcggcaaacaggaacgccgggttcacgcgcatatcgttatggatacgcgtatcggtattcttcagcacctgttcaatgatccgctccatcgggctgtcgccattttccgtgaagtagcgggtaatggtcgggaacagcggctggaacagatgatattcacacaacagcttataggtttcgtaaccgtagcccgcttgtagcagtttaaggctttcttcaaacaggcgtgccggtgggatatcgttcagcagggtagcgaggcgagggatcggttctgcggtttccgggctgatgcgcatacccaatttggcggcaaaacgtaccgcgcgcagcatacgtaccggatcttcacggtagcgcgtttccgggttaccaatcagacggataacgccgtccttcagatccttcatgccgccaacgtaatcacggacggtaaaatccgctacgctgtaatacaggctgttgatagtgaaatcgcggcgctgggcgtcttcttcgatggagccgaaaatgttgtcgcgcagcaacatgccgttttgcccgcgttgggaggtcgtgcggtcgctgacgttaccttcgtggtgtccacggaaggtcgcaacttcgataatctccgggccaaacattacatgagccagacggaaacggcgacccaccaggcggcagttacggaacagtttgcgcacctgctcaggcgtggcgttagtggttacgtcaaaatctttcggctttttgccaagtaacaggtcgcgcacgccgccgccaaccagccaggcttcgtatcccgctttattgagcctgtacattaccttcagggcattttcactgatatctttgcgggaaatagcatactgctcacgcgggatcaccgtcacctgtggacgggcgactgcctgttcagcctcgctttcctcgcggcttagcaccttgcggcaaaaattagcgactcgggtaaaaatagtacacctcggtagtgtcaaacatcattcaggacaaaaaaatagcggctaatcatagctcagcaactcgcattactgaatgtactatttacaattgcgctctcgggcacggcggtaagccgccagtttttgacggcactctgaaggatttgctcgacgctgaaatcctgccagtgtgcttctgcctgctgccccagaaattgaagtgccgcgattagtaccgggcgtggatcgcctttcggcaacgcaggcgcatgattctgcttggaaagtttagcgccttgtggattaagcgccagcggcagatgaatgtaatctggcactttccagccaaaaagctggtacaggctgatttgccttactgttggttcaatcagatcagccccacgcactatttctgtaacgccctggaaatgatcatcaaccacaacagccaggttgtaggcgaacaacccatcacggcgatgaatgataaaatcttcccgtgccagtttttcgtcggcgtgaataatgccgcgcagctggtcagtaaattgcgtgaccggatgctgctggcggatacgcactgcggcgttgtctggtccatgatgcaacacccggcaatgaccgtcgtaaataccgccaatgctttgaatacgcgcacgcgtacaggtgcagtaataacttagtccttgttcatgtaaccaggcgagtgcttcacgataggcgtcgtgacgttggctttgccagagaacatcgccgtcccagtgcagaccgtaatgttccagctggcgcaggatagtttctgcggcaccgggaacttcacgaggcgggtcgatatcttctatgcgtaccagccagcgaccttgccgggcgcgagcctgcaaatagctgccgagcgcggcgatcagagagccaaaatgaagctcgccggaaggagagggggcgaagcggccaatatactgtgtgtctgtcatctctttgaacaaaaaataaggcgggagcatttcccgcctgtggtaaacgtgatggaacggctgtaattagccagccatctgtttttcgcgaatttcagccagcgttttgcagtcgatgcacagatcggctgtcgggcgcgcttccagacggcgaataccaatttcaacaccgcaggattcgcagtagccgaaatcttcgtcttccacttttttcagcgtcttctcgatctttttgatcagcttacgctcgcgatcgcggttacgcagttcgaggctgaactcttcttcctgggctgcacggtctaccgggtccgggaagttggctgcttcatcctgcatatgtgtaacggtgcgatcgacttcatccctgagttgattacgccatgcttccagaatacgacggaagtgcgccagctgggcttcattcatatactcttcgcccggcttctcctgatatggttccaccccagcgatggcgagaatactcagggagcttgttttacggttttgcccttcttgcatgttgcttctccttaacacgcactatcgatccccatgttcgggggaaaaatgaggccgctataaatagcagatgcttttccggatagcaattatctaaacgtaacacttgacaactgtgtgaggaaaagcgtatttgcgcacgcgaccagaatgtaaattaaccagttacttactttattacaatgtaaccggcagactttttttaagagccatgccttcagcagaaatttccgctttgtaagccagaatttctacccccctctgttgagcttcactcaatagttgcgcgtatttctcatcgatgtggcgcgcgggactaaaccgtgtaatggcactatgcagcacggcgaaaaagataaccgcacgctggccttcagccgctacgctcatcaactcccgaaggtgtttctgacctcgttcagtgaccgcatcgggaaaatatccctgttcgttctccgctaacgtaacgcttttcacttcaatatagcagtctggacggctatccgcctgcaacataaagtcaatacggctgcgttctgcgccgtattttacttcgcttttcaggctgctatagccactcagttcactaatactttcattaaggatagcctctttcgtcaacctgttagcccaaagcgtgttgacgcaaataaatgcgccgctctggctttgagttaattcccaggtgtgtgggtatttccgtttggtgttgtcactagtgctataccagacggtatcgccaggcgttgcacaaccggtcatcgcacccgtattcgggcagtgtagcgttaattcgcgaccatcgggtgtgatcacatcggctaaaaaacgtttgtaacgctgaattagcgtcgcgcgctgtagagggggagaaaattccattgcgacaatccttgttattgcgttagcgcccagcgttttagcggcgtgtagcgtgtgcgtccacgggcaaagctggaggcgtaaagggtgaactccgtcaccgcatagctccagttaaaacctggcggcgggattgtcaccgcctcgctggcgtcgcgcaataaggtaatatgtggatgaaacggacgattgctttgaaaacaaccgctgcgggcagcctgactacggagcatattcgccagctggattaagccgcgtggcggctgacgcatccctaaccacaccacacggctacgcagccattgtccggcgtcatcaagcgtgagtgtgaaaccaggttgacgaatccgtccggctaaaagagaaagcgccttctctttctcggcgctcacttcgcctaaaaatgccagagtcagatgcaaattatcggcggcgaccggacgtcccgcctcaggtgggaagtgtgtggcgcgccaatggataatctgttcgcggatttctgcaggtaagtcgatagcaaagaacagacgttgcggttcagacatgtgaggcactcggttatgaattaccgcgatgctacaatgtggcgcgaagaatgttaaccctctggagcgttttgtgagcagcttgcccgttgctgccgtcttacctgaattacttaccgctctcgattgtgcgccgcaggtattattaagtgcgccgaccggggccgggaaaagtacctggctgccgctgcaactgctggcgcatcccggcattaacgggaaaattatcctgctggagccgcgtcgtctggcggcgcgtaacgtcgcgcaacggctggcggagctgcttaacgaaaagccaggcgataccgttggctaccggatgcgtgcgcaaaactgcgtcgggccgaatacccgcctggaagtggttaccgaaggcgtgctgacgcgcatgatccagcgtgacccggaactgagcggtgttggactggtgatccttgatgaatttcatgagcgcagcttgcaggcggatttggcgttggcgctgttactcgatgtgcaacaaggtctgcgtgatgaccttaaactgctgattatgagcgctaccctggacaacgaccgcttgcagcaaatgctgccagaagcgcctgtcgtcatcagtgaagggcgcagctttccggttgaacgccgttatttaccgctgcccgcgcatcagcgttttgacgatgccgttgcggtagccaccgctgaaatgctgcgtcaggaaagcggaagtttactgttatttttacctggcgtcggagaaattcagcgtgtgcaggaacaactggctagccgcatcggcagtgatgtattgctctgcccgctgtatggcgcgttgagcctgaacgatcagcgaaaagcgatcctcccggcaccgcaagggatgcgcaaagtggtgctggcgaccaatattgctgaaaccagtttaaccattgaaggtattcgtctggtggtggattgtgcccaggagcgtgtggcgcgttttgatccgcgcacggggcttacgcgactgattactcaacgcgttagccaggcatccatgacgcagcgtgccgggcgcgccgggcgtctggagccgggtatcagcctgcatttaatcgccaaagaacaagcagaacgcgccgcggcgcaaagtgaaccggagatcttacaaagcgatctttccggtttgctgatggaattactgcaatggggatgcagcgatccggcgcagatgagctggctggatcaaccgccagtagtgaatctactggccgcgaaacgtctgttacaaatgctgggggcactggagggtgaacggcttagtgcgcaagggcaaaaaatggcagcgctgggtaacgatccgcgtttagcggcaatgctggttagcgcgaagaacgacgacgaagctgctaccgcggcaaaaattgccgccattctcgaagagccgccacggatgggcaatagtgacctgggcgtggcgtttagccgcaatcaaccagcctggcagcaacgtagtcagcaactgttaaaacgcttaaacgtacgtggcggtgaggcagacagtagccttatcgcgccgctacttgccggggcgtttgccgatcgcattgctcgtcgccgtgggcaagatggacgctatcaactggcaaacggcatgggagcgatgctcgatgccaacgacgcgctaagccgccacgaatggttgatcgcaccgttattattgcagggcagcgccagcccggatgcgcggattttactggcgctgctggtcgatattgatgagttagtacaacgctgcccgcagctggtacagcagtctgacactgtggagtgggatgacgcgcaaggtacgctgaaagcctggcgtcggctacaaatcggtcagttgacggtgaaagtgcagccgctggcgaaaccgagtgaagacgagttgcatcaggcgatgcttaatggcatccgtgataaaggtttaagcgtgctcaactggacggcggaagcggaacagctacgcttgcgtttgttatgcgccgcaaagtggttgccggaatatgactggccagcggttgatgatgaaagtttattggcagcgctggaaacgtggctgctgccacatatgactggcgtacatagtctacgcggcctgaaaagtctcgacatttatcaggcactacgcggattacttgattggggaatgcagcaacgtctggatagtgaattgcctgcgcattacactgtgccgacgggaagccggatcgccattcgttatcatgaagataacccgcccgcgctggcggtgagaatgcaagagatgtttggcgaggccaccaatccgacgatcgcccaggggcgcgtgccgctggtgctggagttgcttagtcctgcccaaaggccattacaaatcacacgagatttgagcgacttctggaaaggagcgtaccgtgaggtgcaaaaagagatgaaagggcgttatcccaaacatgtctggccggacgacccggcaaatactgcaccgacgcgacggacgaaaaagtatagctaaggttggttttctccctctccctgtgggagagggccggggtgagggcatcagcgcgcacgttcaccctcaccctaaccctctccctcaagggagaggggaccgatcgagcacaaattttgagagatatcttcttctgtcttgtaacagaagaacagaaaatcgggcttttgcgcctgaatattgcggagaaaaagcatggccgggaatgaccgcgagccaattggacgcaaagggaaaccgacgcgtccggtcaaacaaaaggtaagccgtcgtcgttacgaagatgacgatgattacgacgattatgatgactatgaggatgaagaaccgatgccgcgcaaaggtaagggcaaaggcaaagggcgtaagcctcgtggcaaacgcggctggctatggctactgctaaaactggctatcgtttttgccgtgctgatcgccatttacggcgtttatctcgatcaaaaaattcgtagccgtattgatggcaaggtctggcaactgcctgcggcagtttatggccgaatggtcaatcttgagccagacatgaccatcagcaagaacgagatggtgaagctgctggaggcgacccagtatcgtcaggtgagcaaaatgacccgtcctggcgaatttaccgtgcaggccaacagcattgagatgattcgccgtccgtttgatttcccggacagtaaagaaggacaggtgcgcgcgcgtctgacctttgatggcgatcatctggcgacgatcgtcaatatggagaacaaccgtcagttcggtttcttccgtcttgatccgcgtctgatcaccatgatctctagcccaaacggtgagcagcgtctgtttgtgccgcgcagtggtttcccggatttgctggtggatactttgctggcgacagaagaccgtcatttttacgagcatgatggaatcagtctctacagtatcggacgtgcggtgctggcaaacctgaccgccggacgcacggtacagggtgcgagtacgctgacgcaacagctggtgaaaaacctgttcctctccagcgagcgttcttactggcgtaaagcgaacgaagcttacatggcgctgatcatggacgcgcgttacagcaaagaccgtattcttgagctgtatatgaacgaggtgtatctcggtcagagcggcgacaacgaaatccgcggcttcccgctggcaagcttgtattactttggtcgcccggtagaagagctaagcctcgaccagcaggcgctgttagtcggtatggtgaaaggggcgtccatctacaacccgtggcgtaacccaaaactggcgctggagcgacgtaatctggtgctgcgtctgctgcaacagcaacagattattgatcaagaactctatgacatgttgagtgcccgtccgctgggggttcagccgcgcggtggggtgatctctcctcagccagcctttatgcaactggtgcgtcaggagctgcaggcaaaactgggcgataaggtaaaagatctctccggcgtgaagatcttcactacctttgacagcgtggcccaggacgcggcagaaaaagccgccgtggaaggcattccggcactgaagaaacagcgtaagttgagcgatcttgaaactgcgattgtggtcgtcgaccgctttagtggtgaagttcgtgcgatggtcggaggttctgagccgcagtttgcgggctacaaccgtgcgatgcaggcgcgtcgtagcattggttcccttgcaaaaccagcgacttatctgacggccttaagccagccgaaaatctatcgtctgaatacgtggattgcggatgcgccaattgcgctgcgtcagccgaatggccaggtctggagtccgcagaatgatgaccgtcgttatagcgaaagcggcagagtgatgctggtggatgcgttgacccgtagcatgaacgtgccgacggtaaatctggggatggcgctggggctgcctgcggttacggagacctggattaaactgggcgtaccgaaagatcagttgcatccggttccggcaatgctgctgggggcgttgaacttaacgccaatcgaagtggcgcaggcattccagaccatcgccagcggtggtaaccgtgcaccgctttctgcgctgcgtagcgtaatcgcggaagatggcaaagtgctgtatcagagcttcccgcaggcggaacgcgctgttccggcgcaggcggcgtatctgacactatggaccatgcagcaggtggtacaacgcggtacgggtcgtcagcttggggcgaaatacccgaacctgcatctggcagggaaaacagggactaccaacaataacgtagatacctggtttgcgggcattgacggcagcacggtgaccatcacctgggtcggccgtgataacaaccagccgaccaaactgtatggtgccagcggggcaatgagcatttatcagcgttatctggctaaccagacgccaacgccgctgaatcttgttccgccagaagatattgcagatatgggcgtggactacgacggcaactttgtttgcagcggtggcatgcgtatcttgccggtctggaccagcgatccgcaaagcctgtgccagcagagcgagatgcagcagcagccgagtggcaatccgtttgatcagtcttctcagccgcagcaacagccgcaacagcaacctgctcagcaagagcagaaagacagcgacggtgtagccggttggatcaaggatatgtttggtagtaattaacatctaagcgtgaaataccggatggcgagttgccatccggtaaaataacatcccatctaagatattaaccctttcttttcatctggttgtttattaacccttcaggaacgctcagattgcgtaccgcttgcctgtaagactcaatgtaagccgtgccaaaatatgatggctaggacgagctagaacccgccagcgtttcgaatattatcttatctttataataatcattctcgtttacgttatcattcactttacatcagagatataccattccatataacggccctgtacgcctggacggataaagcgtttacgcgacaacggatgcccgatgcgacgctggcgcgtcttatcgggcctacaaacggccccgaatcgtaggtcggataaggcgttcacgccgcatccgacaaaccatgctggatcacaacttcgcaaacacccgacgtgcagcatcgatggtgttattgatatcttccatgctgtgcgccacggacataaagcccgcttcaaacgcactcggtgccaggtaaacaccttcgtccagcatcatatggaagaaacgcttaaagcgttccacgtcacaggccatcacatcctgatagcacgtcacggactcggcgtcggtaaagaaaataccgaacatgccgccaacgtggttaacgaccagcggaattccggcttcttctgccgcttccagcagaccttctgccagacgtgttgtcagctcatccagcgtttcgtgaacgcccggctgcgcgacttcattcagacaggcgaaacccgctgccatcgcaatcgggttaccggaaagcgtacccgcctgatagaccggacccgtcggggccagcgcatccattacatcacgacgaccaccgaatgcgcctaccggcattccaccgccgatgattttgccgaggcaggttaaatctggcactacgccgtaataatcctgtgcgccagctagcgctacgcggaaaccggtcatcacttcatcgatgatcagcaacgcgccaaattcgtcgcacagcgcgcgcagacctggcaggaactctggcagcggcggaacacagttcatattgcctgccaccggctcgacgataatacaggcaatctcttgcgggtattgctcaaatgcggcgcgtacagaagccagatcattataagtacaggttaaggtatatttggcgaaatctgccggaacgcccgggctgtttggctggcctaacgtgagtgcgccagaaccggctttcaccagcaggcagtcagcgtgaccatggtaacacccttcaaatttaataattttgtcgcgaccggtaaaaccacgggccaggcggatggcgctcatggtcgcttcagtgccggagttcaccatgcgcaccatatccatggtcgggaccagttcggtcaccagttgcgccattttcacttccatttcggttggtgcaccaaagcttaaaccacgctcggcggcttcaatcacggcattgcggattgccggatggttatggcccagcaccatcggcccccaggaaccgacataatcgatataggctttgccatcaacatcgtacagataagcgccgtccgctttttcgataaacagtggagtgccgcccacgccagtaaaggcgcgaacaggggagttcacaccgccagggatcagctcgcgcgctgcgctgtaaagattttcagacttactcatggagggttcctgattcgtagaaaaagtgaatggctgctattctatgttattcataacaagttaaatactcgtcaaacatcaggctgcttgtactggtgcaatcctgatttcttagagtataaaagttttgtgcatttgaaacattacgctttgcaaaggattttcatggaacgtgcgagtaaaatgccgtcatcttatttgtatgaccaataagtgatcattggatgaaaactgatactccctctttagaaacaccgcaggccgcgcgcctgcgacgcagacaactgattcgccaacttcttgagcgcgataaaaccccgttagccattttgtttatggcggcagtcgtcggcacgcttgttgggctggcagcggttgcttttgacaaaggtgtcgcctggttgcagaaccaacgtatgggggcgctggtacatactgctgataattatccgcttctgttaaccgtcgcttttctctgtagcgcggtgctggcgatgtttggctactttttggtgcgcaaatacgcgccggaagcaggtggtagcgggatcccggaaattgaaggggcgctggaagatcaacgtcccgttcgctggtggcgtgtattgccggtgaagttctttggcgggctggggacactcggcggaggcatggtgttggggcgcgaagggccaaccgtgcagatcggcggtaacattggccgtatggtgcttgatattttccgcctgaaaggtgacgaagctcgccatacgctgctggcaaccggtgctgctgcggggctggctgcggcctttaacgcgccgctggcgggtattttgtttattatcgaagagatgcgtccgcagtttcgctatacgttaattagcattaaagcggtatttattggtgtcattatgagcaccattatgtaccggatttttaatcatgaagttgcgttgattgacgtcggtaaactttctgatgcgccgcttaatacgctgtggctttatctgatcctcggtattatttttggcattttcggccctatttttaataaatgggtgctggggatgcaggatttgctgcaccgtgtgcacggcggcaatattaccaaatgggtgctaatgggcggtgcgattggcggtctgtgtggattgctggggtttgtggcaccagcaacgagcggcggcggttttaacctgattcctatcgctaccgcggggaatttcagcatgggaatgctggtgtttatcttcgtcgcgcgggtcattaccaccttactctgcttctcttccggcgcgccgggcggtatttttgccccgatgctggcgctgggtactgtgctgggaaccgctttcggaatggttgccgttgagctgtttccgcaatatcaccttgaggcggggacgtttgctattgccggaatgggggcattactggcggcatctattcgcgcgccgttaacggggatcattctggttctggagatgaccgataactaccagctcattttgccaatgattattaccggtcttggcgcaacactattagcgcaatttaccggcgggaaaccgctatacagcgcgattcttgcgcgcacgctggcaaaacaggaagctgagcaactggcgcgaagcaaggccgcaagtgccagcgagaatacttgaacgaaataccagggtattagataatggcgattattattgggttagaatttgcccaattgccgatgtcgtttggagcaaaatatgagtgatgacgtagcactgccgctggagtttaccgacgcagcagccaacaaagttaaaagcctgatcgctgacgaagataacccgaatctgaaattacgcgtgtatatcaccggtggcggttgcagcggcttccagtatggtttcacctttgatgatcaggtgaacgaaggcgatatgaccatcgaaaaacagggcgttggcctggtggttgatccgatgagcctgcaatatctggtcggcggttccgttgattataccgaaggtctggaaggttctcgtttcatcgtgaccaacccgaacgcgaaaagcacctgcggttgcggttcttcctttagtatctaatctgttgttcatgtgccggataaactatccggcacatcttctctcttcaacgcccattctcatccagcgcaaacgtcggtagcttaagatgccaacgaatagccgccagccgaatcaatagcgtcacgaccatgcccatcatactggctgtttccagtggtacggaaaatgtgtaataagccgtagcgtggacaataccgccgataatacaggcagttgcgtagatttctgtacgtaaaatcatggggatttcgcgggccagaacatcacgaatgatcccgccgccaacgccagtaatgacgcccatacaaaccgcgattaacggaccggcttccgcattaaaggctttattcacgccaatgccgacaaacaccgccagaccaacggcgtccagcaccggcaacatccattttggtaagcgtcttggctggcgcaccagcacgatggtcagcatgctggtgaccattgcaacgaccagatcggtgggatctttcacccaaaataccgggccgtgatccagcgccatgtcgcgaattgtcccgccgcctactgcggttaccacgcccagtaccagaacaccaaaagggtccatacgcaattttccggctaacaaaacgccggagatggcaaataccgctgtgccgactatatccagccaatagacgagcattgttcaatccccactgagcacctgaaaaggtcaggcgttaatctacctgactaagcgcattacagagctgttgtgcagcgaggataatacgtgggcttgcacgttcaaaccagtcactcgtgagaggaataacgggaattttgagctgttcaccccagtattgtttgattttaggaatttggtccggtccgcctgtaatgacaatcgcctgtgggctgcgtgctaacacctgttcgcggctaacttgcggccagggaacccggctgtctttaaagatgttttctccgccacaaacttcgagtacctggttctgaatgctctcttttccactggtaaatggcggattaatgccgaattgcagaaaaacacgttttttaggtttatcagcatattgcgctttcaattgcgcgtactgatccagcagggattgcgcggcttgttcggccttgtctggttgcggactccagggggccagttgacgtaacgcattggcaatttgttcaatgcttgtcgcatcgacccacatcacttttattcccaggctagccagctggtcaacctgccgctcggcattacctccacgccaggcaatcaccagatcgggtttcagcgcgacaatgcgttccagattcatcccctgccaggtggaaacctgctcaatcttttgcgcttgtggaggatagtcggaatagctgctgaccccaaccggcgtgatcccggcggcaaaggcaagttcagtgttggcgggagaaagcgtgatgacgcgcggcgcggcgttgagccacagtggcgcaagaaaagacagggcgaccagcgccctgaacagactcttagccatgtgcaagtttctgcaccagactctcaaccatcaggctggactgtttagcggcaacagccaggaactcatcgaagctaagatgagactgttgatcggccacgtcggagatggcgcgtacgacaacaaacgggacgttgaaattgtggcagacatgggcgattgccgtcgcttccatctctacagcaatggcctgtgggaagttgtggcggattttcgccagaccaacagaaccgttgatgaaagcgtcgccgctaacaatcaggccacgtacagcgttaagattcagttcggcaatgcaggcctcagcggcagcgatcagtttatcgtcagctttaaagcctgccggacagcctggtaactgaccgtattcataaccaaatgccgtgacatccgcgtcgtgataacgtgcttcgtcgctgacaacgatatcgcccactttcaacgttggtgccaggccaccggcagaaccggtgttaataatcacatctggcttgcagtgttccaacagcaaagtggcacccagcgccgcagcgactttaccgatgccgcttttcagaagcgcaacctcggttccattcagttggccggtatagatttcgcaaccgccgagactgatagtttgacggttttcgattttgtcacgcagcagcgtaacttcttcttccattgcaccaatgatgccgattttcatagatttactcgcgataagcccgatttgaaggcatagtttaccatgcgcttacggggaagcgtatttctcacgcgggagaggacatggcacagattgatttccgaaaaaaaataaactggcatcgtcgttaccgtagtccgcagggcgttaaaaccgaacatgagatcctgcggatcttcgagagcgatcgcgggcgtatcatcaactctccggcaattcgtcgtctgcaacaaaagacccaggtttttccactggagcgcaatgccgccgtgcgcacgcgtcttacccacagcatggaagtccagcaggtggggcgctacatcgccaaagaaattttaagccgtctgaaagagcttaaattactggaagcatacggcctggatgaactgaccggtccctttgaaagcattgttgagatgagttgcctgatgcacgatatcggcaatccgccgtttggtcattttggcgaagcggcgataaatgactggtttcgccaacgtttgcacccggaagatgccgaaagccagcctctgactgacgatcgctgcagcgtggcggcactacgtttacgggacggggaagaaccgcttaacgagctgcggcgcaagattcgtcaggacttatgtcattttgaggggaatgcacaaggcattcgcctggtgcatacattgatgcggatgaatctcacctgggcacaggttggcggtattttaaaatatacccgtccggcgtggtggcgtggcgaaacgcctgagacacatcactatttaatgaaaaagccgggttattatctttctgaagaagcctatattgcccggttgcgtaaagaacttaatttggcgctttacagtcgttttccattaacgtggattatggaagctgccgacgacatctcctattgtgtggcagaccttgaagatgcggtagagaaaagaatatttaccgttgagcagctttatcatcatttgcacgaagcgtggggccagcatgagaaaggtagcctctttagcctggtggttgaaaatgcctgggaaaaaagtcgcagtaatagtttaagccgcagtacggaagatcagttttttatgtatttacgggtaaacaccctaaataaactggtaccctacgcggcacaacgatttattgataatctgcctgcgattttcgccggaacgtttaatcatgcattattggaagatgccagcgaatgcagcgatcttcttaagctatataaaaatgtcgctgtaaaacatgtgtttagccatccagatgtcgagcggcttgaattgcagggctatcgggtcattagcggattattagagatttatcgtcctttattaagcctgagcttaagtgactttactgaactggtagaaaaagaacgggtgaaacgtttccctattgaaagccgcttattccacaaactcagcacgcgccatcggctggcctatgtcgaggctgtcagtaaattaccgagtgattctcctgagtttccgctatgggaatattattaccgttgccgcctgctgcaggattatatcagcggtatgaccgacctctatgcgtgggatgaataccgacgtctgatggccgtagaacaataaccaggcttttgtaaagacgaacaataaatttttaccttttgcagaaactttagttcggaacttcaggctataaaacgaatctgaagaacacagcaattttgcgttatctgttaatcgagactgaaatacatgaaaaaaaccacattagcactgagtgcactggctctgagtttaggtttggcgttatctccgctctctgcaacggcggctgagacttctagtgcaacgacagcccagcagatgccaagccttgcaccgatgctcgaaaaggtgatgcctagtgtggtcagcattaacgtagaaggtagcacaaccgttaatacgccgcgtatgccgcgtaatttccagcagttcttcggtgatgattctccgttctgccaggaaggttctccgttccagagctctccgttctgccagggtggccagggcggtaatggtggcggccagcaacagaaattcatggcgctgggttccggcgtcatcattgatgccgataaaggctatgtcgtcaccaacaaccacgttgttgataacgcgacggtcattaaagttcaactgagcgatggccgtaagttcgacgcgaagatggttggcaaagatccgcgctctgatatcgcgctgatccaaatccagaacccgaaaaacctgaccgcaattaagatggcggattctgatgcactgcgcgtgggtgattacaccgtagcgattggtaacccgtttggtctgggcgagacggtaacttccgggattgtctctgcgctggggcgtagcggcctgaatgccgaaaactacgaaaacttcatccagaccgatgcagcgatcaaccgtggtaactccggtggtgcgctggttaacctgaacggcgaactgatcggtatcaacaccgcgatcctcgcaccggacggcggcaacatcggtatcggttttgctatcccgagtaacatggtgaaaaacctgaccagccagatggtggaatacggccaggtgaaacgcggtgagctgggtattatggggactgagctgaactccgaactggcgaaagcgatgaaagttgacgcccagcgcggtgctttcgtaagccaggttctgcctaattcctccgctgcaaaagcgggcattaaagcgggtgatgtgatcaccagtctgaacggtaagccgatcagcagctttgccgcactgcgtgctcaggtgggtactatgccggtaggcagcaaactgaccctgggcttactgcgcgacggtaagcaggttaacgtgaacctggaactgcagcagagcagccagaatcaggttgattccagctccatcttcaacggcattgaaggcgctgagatgagcaacaaaggcaaagatcagggcgtggtagtgaacaacgtgaaaacgggcactccggctgcgcagatcggcctgaagaaaggtgatgtgattattggcgcgaaccagcaggcagtgaaaaacatcgctgaactgcgtaaagttctcgacagcaaaccgtctgtgctggcactcaacattcagcgcggcgacagcaccatctacctgttaatgcagtaatctccctcaaccccttcctgaaaacgggaaggggttctccttacaatctgtgaacttcaccacaactccatacatcttcatcatcctttaggcatttgcacaatgccgtacgttacgtacttccttatgctaagccgtgcataacggaggacttatggctggctggcatcttgataccaaaatggcgcaggatatcgtggcacgtaccatgcgcatcatcgataccaatatcaacgtaatggatgcccgtgggcgaattatcggcagcggcgatcgtgagcgtattggtgaattgcacgaaggtgcattgctggtacttagtcagggacgagtcgtcgatatcgatgacgcggtagcacgtcatctgcacggtgtgcggcaggggattaatctaccgttacggctggaaggtgaaattgtcggcgtaattggcctgacaggtgaaccagagaatctgcgtaaatatggcgaactggtctgcatgacggctgaaatgatgctggaacagagccggttgatgcacttgttggcgcaggatagccgtttgcgggaagaactggtgatgaacctgattcaggcagaggagaatactcccgcacttactgaatgggcgcaacggctggggatcgatctcaatcaaccgcgagtggtggctattgttgaggtcgacagcggtcagcttggcgtggacagcgcaatggcggagttacaacaactgcaaaacgcgctgactacgcccgagcgtaataatctggtggcgattgtcagcctaaccgaaatggtggtgttgaaaccggcgttgaactcttttgggcgctgggatgcagaagatcatcgtaagcgagttgaacaactgattacccgcatgaaagagtacggccagctgcgttttcgcgttagtctgggcaactattttaccggtcctggcagtattgcccgatcctatcgtacggcgaaaacgacgatggtggtgggtaaacagcggatgccagaaagtcgctgctatttttatcaggatctgatgttacctgtgttactcgacagtttgcgtggcgactggcaggccaacgaactggcgcgaccgctggcgcggctgaaaacgatggacaataacggcttgctgcgacgaacgctggcggcgtggtttcgccacaatgtgcaaccgctggcaacgagtaaggcgttgtttattcatcgtaataccctggagtatcggcttaatcgtataagcgaactgaccgggcttgatttgggcaattttgatgacaggttgctgctgtatgtggcgttacaactggatgaagagcggtaagttatgcgttaaggttgaggcggcgctggctcattcccctcagcccgaagggtagaggggaatgcccgaattaaccgtcagttcgggattatttacgcgttagtttttccagatcggcttcaatctcgctgatcttattggttacgacactctccaggtgacgtaagtcgtcgaggatcttacgcttaagatcaacttcgctgcggtcacgctggcagatttgatcaagctcatcaatgatataccgtagattcgggctgatttcctggacttctttataaccctgacccacaccatcagcgacgaccgttttacgctgacgcggatatttaaacttaacgctcttggcgaaaaactcgcctttgtctttctggaaatagattttcagaatatcgttgttggcttcctgccggaggctgtaacgatcaatttcttcaggattggtaatacccagacttttcagattgtcgtacatagcgttacctcaaaatgagtcagtaaattgtgcttattttagcatttggcctggcccgcccggctcgactgtgatcgcagaaagcctttttcttccagacttctatcatggcgtaaaaatcaaaaaattacctgctttattctggtgataaaattcacgatttacaccagttccagcatcgttacttccgggcggcagttcagacgcaaaccatacaaactgcccacgccacgggttgtgtagatgtgtctttcgccaaaggcatttaatccggcgacgtaacgtttatcttcgacaggggcaaaaggttcaccaaccaacggtacgcgcagttgcccgccgtgagtatggccgcacagcatcagatcccagggttcatcacgcatgacttctttgctgtcgggattatgcgccagcaccagtcttggcagattggcttcgctggcgggaggcggtttgcattgtccggcccataagtcaccagtgcctaccagttcgaattgcctgttcggcgtggcgatcaccgtagcctggttaaacaacaccgtgatgcccgcacttttcaacgtctcgccaattaagtgatttttttctgtaccaacagggcgatcgtggttgccgaagcaggcaaacgtcggcgcacattcggcaaggggggagagtacgtcactaaacgcgctaaaattcaggctcatatcaaataatacgtaatcgccgcccagtaatatcaaatcgggcttttgttctatgccaagagcaatcgcgtcagaaatcaggcttaaaggaacaaaacgagagtaatggagatcggccagaaaaagaattttgaatggtgctgcgttgtctttaaaaaaggcgaggcggtgacggattaattcaaaccagcctggctcacagtaatgcatataaccgaaaccactgctcgtggctatcgtcgcggcagtagcctgcaaaaatcggcggcgactaatcatcgctcatccctgcaaaaaaatcgggcagcgtcgtgctgcccgtgtgcatacttttagtcgatggtacgcagcagttcgttaatgccgactttgccgcgagttttcgcgtcaactttcttaacgataaccgcacagtagaggctgtatttgccatctttactcggcagattaccactaacaaccacagaccccgccggaacgcgaccgtagtggatttcgccggtttcacggtcgtaaatacgggtgctctgaccaatgtatacgcccatggaaatgacggaaccttcttcgacaatcaccccttcaaccacttcagagcgcgcgccgatgaagcaattatcttcaatgatggttgggttagcctgcagcggttccagcacgccgccgatgcccacgccaccggaaaggtggacgtttttaccaatctgcgcacaagaaccgacggtcgcccaggtatcaaccatggtgccttcatcaacatatgcgccgatgttgacgtaagacggcatcagcacggtgttacgggcaataaacgcaccctgacgtaccgccgctggtggcacaacgcggaagccttctttctggaaacgtgcttcgtcgtagtcggcgaatttcatcggcactttgtcgaagtagcggctttctgccccttcgatcacctgattatcattaatacggaaagagagcagcaccgcttttttcaaccactgatgcgtcacccactgaccgtcaattttttccgctacacgcagtgcgccggaatccagcagggcgatcacctgatttaccgcttcgcgggtaacggtgtctgcattggctggcgtgatctcggcacggcgttcaaaagcggtttcaataatgttctgtaactgctgcattgttaaactcttttcatatcagtaaacacatcaccctttatcgtttggattgagggcctctgtcaaccgctgatgcacttcctgctgcaactcgttattaagcgcacgccggtcagcggtggcaattatgaataaatcttctactcgctcgccaatggttgtaattcgggcaccatgaaggctaattcccagatcggcaaaaattttcccgactcgcgccagcagtccaggttggtcgagggcgatcagttcgaggaagcttttgcggtcggtatgggtcggcaaaaacgttacttcggtttcaacagtaaaatggcgtaatttggcgggttggcgacggggctgcggtggctgccagctactttgcgtcagtacttgctccagaccaaaccgaataacctcatgacgatctgcggacagcgggttgccatcgggttccagcacgataaaggtatccatcgccataccgtcgcgagtggtgaaaatttgtgcgtcgtgaacacttaaattgcggcggtctaattcggcacagacggcggcaaacagataagggcggtccgggctccagataaaaatctcggtgcctccacgcgtagcctgcgggctaagcaataccagcggtttgcttaaatcatgctgtaataaatggcgggcatgccaggccagttgatttgggctatggcggacaaaatagttagcacgacagcgactccaaatttggtgcagcgcctcttcgtcgatgttatccatgcgcagtagtgccagtgcctggagttggtgatggcgaacccgttcgcgcatatccggcgtgttttgcattccgcgtcgtagctgcttttcggtggcaaagtagagctcacgcaacagactttgcttccagctattccacagcgtttcgttggtggcgcaaatgtcagccacagtcaggcataccagatagcgcagacgattttccgtttgcacttcttcggcaaactgcttgatgacttccgggtcctgaatatcgcggcgttgggcggtcacgctcatcaacaggtgctggcgaaccagccaggcgaccagctgtgtttcgcgactgttcagcccgtggagttcggcaaaatgcactacatcctgagcaccgagaatggagtggtcgccgccgcgtcctttggcgatatcgtgaaacagcgcggcgatgaaaatcagctcagtactcggcaggcgcggccagacgtccacacacaacggatggcgctggcgcgtttcttcactggcaaaactctccagtttcagcatcacgcggatagtatgttcatccaccgtgtaggcgtggaacagatcaaactgcatctgcccgacgatatggctccattgcggcatatacgcgccgagcacgctatggcgatgcattggcaatagcccgcgccgcaccgctccggggtgacgcagaatgctcaaaaacagttttcgtgcttccggaatattacacagcggttgttgcagatggcgacgggcatggcgtaactggcgcagcgtggtggagtaaatgccggtgatcgcactgttgtgcaccatggtgtagaacatacgcaagatggcttccggctggcgcataaatagtgtttcatcacgcaggtcgattagcgtaccgcgtagctgaaactcatcgtcgattggacgtggtttttcgtcggcgggaagggcgaggatggcttcatcgaacagttgcagcagcatctggttgagttcactgacgcggcgtgtaacgcggaagtaatccttcatcatccgctcgaccggttcgttaccttcaccactgtaattcagacgctgggcgacgctaagctggcgatcgaataacaggcgattatcgtaacggctgacgaccagatgcagggcaaagcgaatacgccacaatatatgcagacattcgtttaattccgcccgctccgcactggttaagaagccaaacccgaccatttcatccaggcttgttgcgccaaaatgacggcgggccacccattgcagagtgtggatatcgcgcaagccgccagggctgcttttgatgtctggttcaaggttgtagctggtgccatggtaacgctgatggcgctggttctgttcttcaactttcgccgcgtagaacttgtcggaaggccagaatccttcgctgaaaatatgtttttgcagttcgaggaacagcgcaacatcgccaattaataagcgggattcgattaaattggtggcgacggttaaatcgcttaacccttccagcatgcactcttcaagcgtgcgcacgctatgaccgacttccagctttacatcccagagcagcgttaacagctcgcccactttttgcgcctgatcgtccgggagctttttacggcttaaaatcagtaaatcgacgtcactaagtggatgcagctcgccacgaccgtagccaccgacggcgaccaatgccaggtcggcaatctggctgaatcccgcttcaatccataatcgttgcaggagctggtcgataaactcggtgcgcgcctcaatcaactgttctgcagagatcccattgtcaaaggcatcacccagccaacgctggaaagtatcgatatgggcttttatcccaccgacggttaattcatcacggggccagacgcatggattttgcggttgaccgggcagggtggggagagcggtgtttgcgtactgttctggaagggtattcattgtgcgccacccataagattaaattatcgcattaaaaaagccggcattcgccggcttcatcttattcgtcgtggctgattatcgccgggatggtgtcatccttgcgtagcgtcagaatttcgcagccgttatcagtcaccacaatagtatgctcatattgtgcagacaagctgcgatctttggtttttaccgtccagccatctttcatggtgcggatctcttttttacccgcgttgaccattggctcgatggtgaacgtcatcccaggtttcagtacgacgttggtttcacgggagtcatagtgcagcacctgcggttcttcatggaagccgcgaccaataccgtgtccgcaatattcacgaacgacggagaagccttctgcttcgacaaatttctgaatcgccgcaccgatttcgcgcagattaatgcctggttttaccatgcgtagcgccaggtacaggctttcttgcgtgatgcggcacagacgttcgcccatgatggtcggcttaccgacgataaacattttgctggtatcgccgtggaaaccatctttgattacggtgacatcaatgttaacgatatcgccatctttcagcagcttagcatcgtccgggataccgtggcacaccacttcattaatagagatgcaaacggatttcggatagccgtgatagccgaggcaggcagaaaccgcgtgttgttcattaacaatgtaatcattacagatgcgatccagctcgccggtgctgacgcccggtttaacatacggttcgatcatctccagcacttcggcagccagtcggccagcgacgcgcattttttcgatatcttctggggtcttgatagagatagccattaattctgtccatcagcgtcggtgataccgacaatatatatgtaagtgccgtcaatggtatcacacccgggcaaattgagaatcattctgaatttcgccaaacgtgccactgaaggttttctataatagaaaattcgacgtctgatgctgtacacagcgccaacaattattggtgtccacgacgtatttgtggtataaagcgcgccggacttccgatccatttcgtatacacagactggacggaagcgacaatctcactttgtgtaacaacacacacgtatcggcacatattccggggtgccctttggggtcggtaatatgggatacgtggaggcataaccccaacttttatatagaggttttaatcatggcaactgtttccatgcgcgacatgctcaaggctggtgttcacttcggtcaccagacccgttactggaacccgaaaatgaagccgttcatcttcggtgcgcgtaacaaagttcacatcatcaaccttgagaaaactgtaccgatgttcaacgaagctctggctgaactgaacaagattgcttctcgcaaaggtaaaatccttttcgttggtactaaacgcgctgcaagcgaagcggtgaaagacgctgctctgagctgcgaccagttcttcgtgaaccatcgctggctgggcggtatgctgactaactggaaaaccgttcgtcagtccatcaaacgtctgaaagacctggaaactcagtctcaggacggtactttcgacaagctgaccaagaaagaagcgctgatgcgcactcgtgagctggagaaactggaaaacagcctgggcggtatcaaagacatgggcggtctgccggacgctctgtttgtaatcgatgctgaccacgaacacattgctatcaaagaagcaaacaacctgggtattccggtatttgctatcgttgataccaactctgatccggacggtgttgacttcgttatcccgggtaacgacgacgcaatccgtgctgtgaccctgtacctgggcgctgttgctgcaaccgtacgtgaaggccgttctcaggatctggcttcccaggcggaagaaagcttcgtagaagctgagtaataaggcttgataactcccccaaaatagttcgagttgcagaaaggcggcaagctcgagaattcccgggagcttacatcagtaagtgaccgggatgagcgagcgaagataacgcatctgcggcgcgaaatatgaagggggagagcccttatagaccaggtagtacacgtttggttagggggcctgcatatggccccctttttcacttttatatctgtgcggtttaatgccgggcagatcacatctccgaggattttagaatggctgaaattaccgcatccctggtaaaagagctgcgtgagcgtactggcgcaggcatgatggattgcaaaaaagcactgactgaagctaacggcgacatcgagctggcaatcgaaaacatgcgtaagtccggtgctattaaagcagcgaaaaaagcaggcaacgttgctgctgacggcgtgatcaaaaccaaaatcgacggcaactacggcatcattctggaagttaactgccagactgacttcgttgcaaaagacgctggtttccaggcgttcgcagacaaagttctggacgcagctgttgctggcaaaatcactgacgttgaagttctgaaagcacagttcgaagaagaacgtgttgcgctggtagcgaaaattggtgaaaacatcaacattcgccgcgttgctgcgctggaaggcgacgttctgggttcttatcagcacggtgcgcgtatcggcgttctggttgctgctaaaggcgctgacgaagagctggttaaacacatcgctatgcacgttgctgcaagcaagccagaattcatcaaaccggaagacgtatccgctgaagtggtagaaaaagaataccaggtacagctggatatcgcgatgcagtctggtaagccgaaagaaatcgcagagaaaatggttgaaggccgcatgaagaaattcaccggcgaagtttctctgaccggtcagccgttcgttatggaaccaagcaaaactgttggtcagctgctgaaagagcataacgctgaagtgactggcttcatccgcttcgaagtgggtgaaggcatcgagaaagttgagactgactttgcagcagaagttgctgcgatgtccaagcagtcttaattatcaaaaaggagccgcctgagggcggcttctttttgtgcccatcttgtaaattcagctaacccttgtggggctgcgctgaaaagcgacgtacaatgtcgctagtattaattcatttcaatcgttgacagtctcaggaaagaaacatggctaccaatgcaaaacccgtctataaacgcattctgcttaagttgagtggcgaagctctgcagggcactgaaggcttcggtattgatgcaagcatactggatcgtatggctcaggaaatcaaagaactggttgaactgggtattcaggttggtgtggtgattggtgggggtaacctgttccgtggcgctggtctggcgaaagcgggtatgaaccgcgttgtgggcgaccacatggggatgctggcgaccgtaatgaacggcctggcaatgcgtgatgcactgcaccgcgcctatgtgaacgctcgtctgatgtccgctattccattgaatggcgtgtgcgacagctacagctgggcagaagctatcagcctgttgcgcaacaaccgtgtggtgatcctctccgccggtacaggtaacccgttctttaccaccgacagtgcagcttgcctgcgtggtatcgaaattgaagccgatgtggtgctgaaagcaaccaaagttgacggcgtgtttaccgctgatccggcgaaagatccaaccgcaaccatgtacgagcaactgacttacagcgaagtgctggaaaaagagctgaaagtcatggacctggcggccttcacgctggctcgtgaccataaattaccgattcgtgttttcaatatgaacaaaccgggtgcgctgcgccgtgtggtaatgggtgaaaaagaagggactttaatcacggaataattcccgtgatggataaataagggtaagattccgcgtaagtatcgcgggggcgtaagtctggttataaggcgttattgttgcaggcagtttggtcacggccagcgcgcagcaaccggagcgtacaaaagtacgtgaggatggcgagcactgcccggggccaaaatggcaaataaaatagcctaataatccagacgattacccgtaatatgtttaatcagggctatacttagcacacttccactgtgtgtgactgtctggtctgactgagacaagttttcaaggattcgtaacgtgattagcgatatcagaaaagatgctgaagtacgcatggacaaatgcgtagaagcgttcaaaacccaaatcagcaaaatacgcacgggtcgtgcttctcccagcctgctggatggcattgtcgtggaatattacggcacgccgacgccgctgcgtcagctggcaagcgtaacggtagaagattcccgtacactgaaaatcaacgtgtttgatcgtagtatgtctccggccgttgaaaaagcgattatggcgtccgatcttggcctgaacccgaactctgcgggtagcgacatccgtgttccgctgccgccgctgacggaagaacgtcgtaaagatctgaccaaaatcgttcgtggtgaagcagaacaagcgcgtgttgcagtacgtaacgtgcgtcgtgacgcgaacgacaaagtgaaagcactgttgaaagataaagagatcagcgaagacgacgatcgccgttctcaggacgatgtacagaaactgactgatgctgcaatcaagaaaattgaagcggcgctggcagacaaagaagcagaactgatgcagttctgatttcttgaacgacaaaaacgccgctcagtagatccttgcggatcggctggcggcgttttgctttttattctgtctcaactctggatgtttcatgaagcaactcaccattctgggcagcaccggcagcattggttgcagcacgctggacgtggtgcgccataatcccgaacacttccgcgtagttgcgctggtggcaggcaaaaatgtcactcgcatggtagaacagtgcctggaattctctccccgctatgccgtaatggacgatgaagcgagtgcgaaacttcttaaaacgatgctacagcaacagggtagccgcaccgaagtcttaagtgggcaacaagccgcttgcgatatggcagcgcttgaggatgttgatcaggtgatggcagccattgttggcgctgctgggctgttacctacgcttgctgcgatccgcgcgggtaaaaccattttgctggccaataaagaaagtctggttacctgcggacgtctgtttatggacgccgtaaagcagagcaaagcgcaattgttaccggtcgatagcgaacataacgccatttttcagagtttaccgcaacctatccagcataatctgggatacgctgaccttgagcaaaatggcgtggtgtccattttacttaccgggtctggtggccctttccgtgagacgccattgcgcgatttggcaacaatgacgccggatcaagcctgccgtcatccgaactggagcatggggcgtaaaatttctgtcgatagcgctaccatgatgaacaaaggtctggaatacattgaagcgcgttggctgtttaacgccagcgccagccagatggaagtgctgattcacccgcagagtgtgattcacagtatggtgcgctatcaggacggcagtgttctggcgcagctgggggaaccggatatgcgtacgccaattgcccacaccatggcatggccgaatcgcgtgaactctggcgtgaagccgctcgatttttgcaaactaagtgcgttgacatttgccgcaccggattatgatcgttatccatgcctgaaactggcgatggaggcgttcgaacaaggccaggcagcgacgacagcattgaatgccgcaaacgaaatcaccgttgctgcttttcttgcgcaacaaatccgctttacggatatcgctgcgttgaatttatccgtactggaaaaaatggatatgcgcgaaccacaatgtgtggacgatgtgttatctgttgatgcgaacgcgcgtgaagtcgccagaaaagaggtgatgcgtctcgcaagctgaggataatccggctacagagagtcgcgctatttgttagcgtagggcttcagtgatatagtctgcgccatctgatcgtaagtagttggctttataaggtcagatatgccgtggttttacacggcttttttttgtataggcttcagtattcctgagtaccgtaaaccctgtcagggaataaaaaacgcgtgatgttgtctgctactcaaccacttagcgaaaaattgccagcgcatggctgccgtcatgttgcgatcattatggacggcaatggccgctgggcaaaaaagcaagggaagattcgtgcctttgggcataaagccggggcaaaatccgtccgccgggctgtctcttttgcggccaacaacggtattgaggcgttaacgctgtatgcctttagtagtgaaaactggaaccgaccagcgcaggaagtcagtgcgttaatggaactgtttgtgtgggcgctcgatagcgaagtaaaaagtctgcaccgacataacgtgcgtctgcgtattattggcgataccagtcgctttaacagccgtttgcaagaacgtattcgtaaatctgaagcgctaacagccgggaataccggtctgacgctgaatattgcggcgaactacggtggacgttgggatatagtccagggagtcaggcaactggctgaaaaggtgcagcaaggaaacctgcaaccagatcagatagatgaagagatgctaaaccagcatgtctgtatgcatgaactggcccctgtagatttagtaattaggactgggggggagcatcgcattagtaactttttgctttggcaaattgcctatgccgaactttactttacagatgttctctggcccgatttcgatgaacaagactttgaaggggcgttaaatgcctttgctaatcgagagcgtcgtttcggcggcaccgagcccggtgatgaaacagcctgatgggggtcgcttttgctgaagtatcgcctgatatctgcttttgtgttaatacccgtcgtcatcgcggcgttgtttctgttgccgccggtggggttcgccattgtaacgctggtggtctgcatgctggcagcgtgggaatggggacagcttagcggttttaccactcgtagccagcgagtatggttggcggtgttatgcgggttattgttggcgctgatgctttttctgttgccggaatatcaccgaaatattcatcaaccgctggttgaaatcagtctttgggctagcctgggttggtggattgtcgcgctattgctggtgctgttttacccaggttccgcagcaatctggcgtaactctaaaacattgcgccttatttttggcgtgctaaccattgttcccttcttctggggcatgctggcgttacgggcctggcactatgacgagaatcattacagtggcgcaatatggttgctctatgtcatgatcctggtatggggcgctgactccggcgcatatatgtttggcaaattgtttggtaaacataagctggcaccgaaggtttctccgggtaaaacctggcaaggctttatcggtggactcgctactgcagcggtaatcagttggggttatggcatgtgggcgaatctcgacgtcgctcccgtcaccttactcatttgctctattgtcgcagcgttagccagtgtgctcggcgatctgaccgagagtatgtttaagcgtgaagcaggaattaaggacagcggtcatttaattccaggacacggtggtattttagatcgtattgatagcctgacggctgcggtaccggtctttgcttgcttgttgttactggtattcaggacgctttaacggaaggtaatatgctgagttttctctgggatttggctagcttcatcgttgcactgggtgtacttatcaccgtgcatgaatttggtcatttctgggttgcccggcgttgtggtgttcgcgttgagcgtttcagtatagggtttggtaaggcgctctggcggcgaactgataagctcggcaccgaatatgttatcgccctgatcccgttgggcggttatgtcaaaatgctggatgagcgcgcagaaccggtcgttccggaactccgccaccatgccttcaataataaatctgtcggccaacgagcggcgattattgccgcaggtccggttgcaaacttcatttttgctatctttgcctactggctggtttttattattggtgtgcctggcgtacgtccggtggttggcgaaatagcagccaatagcatagctgcggaagcacaaattgcaccaggtacggaactaaaagccgtagatggtatcgaaacgcctgattgggatgccgtgcgtttgcagttggtcgataaaattggcgatgaaagcaccaccattacagtagcgccatttggcagcgaccaacggcgggatgtaaagctcgatttacgtcactgggcgtttgagcctgataaagaagatccggtatctagcctggggattcgtcctcgtgggccgcaaattgaacctgtactggaaaatgtgcagccaaacagcgcggcaagcaaggcaggtttgcaagcaggcgacaggatcgttaaagtcgatggtcagcccttaacgcagtgggtgacctttgtgatgcttgtccgggataacccgggtaaatccttagcgttagaaatcgaaaggcaggggagtcccttgtctttgacattaatcccggagagtaaaccgggtaatggtaaagcgattggttttgtcggtattgagccgaaagtcattcctttgccagatgagtataaagttgtacgccagtatgggccgttcaacgccatcgtcgaagccacggacaaaacgtggcagctgatgaagctgacggtcagtatgctgggaaaattgatcaccggtgatgtgaaactgaacaacctcagtgggccgatctctatcgccaagggggctgggatgacagcggaactcggggttgtttattacctgccgtttcttgcgcttattagcgtgaacttagggataattaacctgtttccgttgcccgtacttgacggggggcatctgctgttccttgcgatcgaaaagatcaagggcggaccggtatccgagcgggttcaagacttttgttatcgcattggcagcattctgctggtgctgttaatggggcttgcacttttcaatgatttctctcggttatgagagttagttaggaagaacgcataataacgatggcgatgaaaaagttgctcatagcgagcctgctgtttagcagcgccaccgtatacggtgctgaagggttcgtagtgaaagatattcatttcgaaggccttcagcgtgtcgccgttggtgcggccctcctcagtatgccggtgcgcacaggcgacacggttaatgatgaagatatcagtaataccattcgcgctctgtttgctaccggcaactttgaggatgttcgcgtccttcgtgatggtgatacccttctggttcaggtaaaagaacgtccgaccattgccagcattactttctccggtaacaaaagcgtgaaagatgacatgctgaagcaaaacctcgaggcttctggtgtgcgtgtgggcgaatccctcgatcgcaccaccattgccgatatcgagaaaggtctggaagacttctactacagcgtcggtaaatatagcgccagcgtaaaagctgtcgtgaccccgctgccgcgcaaccgtgttgacctaaaactggtgttccaggaaggtgtgagtgctgaaatccagcaaattaacattgttggtaaccatgctttcaccaccgacgaactgatctctcatttccaactgcgtgacgaagtgccgtggtggaacgtggtaggcgatcgtaaataccagaaacagaaactggcgggcgaccttgaaaccctgcgcagctactatctggatcgcggttatgcccgtttcaacatcgactctacccaggtcagtctgacgccagataaaaaaggtatttacgtcacggtgaacatcaccgaaggcgatcagtacaagctttctggcgttgaagtgagcggcaaccttgccgggcactccgctgaaattgagcagctgactaagatcgagccgggtgagctgtataacggcaccaaagtgaccaagatggaagatgacatcaaaaagcttctcggtcgctatggttatgcctatccgcgcgtacagagcatgcccgaaattaacgatgccgacaaaaccgttaaattacgtgtgaacgttgatgcgggtaaccgtttctacgtgcgtaagatccgttttgaaggtaacgataccagcaaagatgccgtcctgcgtcgcgaaatgcgtcagatggaaggtgcatggctggggagcgatctggtcgatcagggtaaggagcgtctgaatcgtctgggcttctttgaaactgtcgataccgatacccaacgtgttccgggtagcccggaccaggttgatgtcgtctacaaggtaaaagagcgcaacaccggtagcttcaactttggtattggttacggtactgaaagtggcgtgagcttccaggctggtgtgcagcaggataactggttaggtacaggttatgctgttggtatcaacgggaccaaaaacgattaccagacctatgctgaactgagcgtaaccaacccgtacttcaccgtagatggcgtaagcctcggtggtcgtctcttctataatgacttccaggcagatgacgccgacctgtccgactataccaacaagagttatggtacagacgtgacgttgggcttcccgattaacgaatataacagcctgcgtgcaggtctgggttatgtacataactccctgtccaacatgcagcctcaggttgcgatgtggcgttatctgtactctatgggtgaacatccgagcacctctgatcaggataacagcttcaaaacggacgacttcacgttcaactatggttggacctataacaagcttgaccgtggttacttcccgacagatggtagtcgtgtcaacctgaccggtaaagtgaccattcctggaagcgataacgaatactacaaagtgacgttagacacggcgacttatgtgccgatcgatgacgatcacaaatgggttgttctggggcgtacccgctggggttatggtgatggtttaggcggcaaagagatgccgttctacgagaacttctatgccggtggttccagcaccgtgcgtggcttccagtccaataccattggtccgaaagcagtttacttcccgcatcaggccagtaattatgatccggactatgattacgaatgtgcgactcaggacggcgcgaaagacctgtgtaaaagcgatgatgctgtaggcggtaacgccatggcggttgccagcctcgagttcatcaccccgacgccgtttattagcgataagtatgctaacagcgttcgtacttccttcttctgggatatgggtaccgtttgggatacaaactgggattccagccaatattctggatatccggactatagtgatccaagcaatatccgtatgtctgcgggtatcgcattacaatggatgtccccattggggccgttggtgttctcctacgcccagccgttcaaaaagtacgatggagacaaggcagaacagttccagtttaacatcggtaaaacctggtaagtgttctccacaaaggaatgtagtggtagtgtagcgatgactttaggcgatcaatataagatcgccgggccacgcaaagaactgcaccctccggtgcaaatgggatggtaaggagtttattgtgaaaaagtggttattagctgcaggtctcggtttagcactggcaacttctgctcaggcggctgacaaaattgcaatcgtcaacatgggcagcctgttccagcaggtagcgcagaaaaccggtgtttctaacacgctggaaaatgagttcaaaggccgtgccagcgaactgcagcgtatggaaaccgatctgcaggctaaaatgaaaaagctgcagtccatgaaagcgggcagcgatcgcactaagctggaaaaagacgtgatggctcagcgccagacttttgctcagaaagcgcaggcttttgagcaggatcgcgcacgtcgttccaacgaagaacgcggcaaactggttactcgtatccagactgctgtgaaatccgttgccaacagccaggatatcgatctggttgttgatgcaaacgccgttgcttacaacagcagcgatgtaaaagacatcactgccgacgtactgaaacaggttaaataagtaatgcctagtattcgactggctgatttagcgcagcagttggatgcagaactacacggtgatggcgatatcgtcatcaccggcgttgcgtccatgcaatctgcacaaacaggtcacattacgttcatggttaacccaaaataccgtgagcatttaggcttgtgccaggcgtccgcggttgtcatgacccaggacgatcttcctttcgcgaaaagtgccgcactggtagtgaagaatccctacctgacttacgcgcgcatggcgcaaattttagataccacgccgcagcccgcgcagaacattgcacccagtgcggtgatcgacgcgacggcgaagctgggtaacaacgtaagcattggcgctaacgcggtgattgagtccggcgttgaactgggcgataacgtgattatcggtgccggttgcttcgtaggtaaaaacagcaaaatcggtgcaggtagccgtctctgggcgaacgtaaccatttaccatgagatccagatcggtcagaattgcctgatccagtccggaacagtggtaggcgcagacggctttggttatgccaacgatcgtggtaactgggtgaagatcccacagattggtcgcgtaattattggcgatcgcgtggagatcggtgcctgcacaaccatcgatcgcggcgcgctggatgacactattattggcaatggcgtgatcattgataaccagtgccagattgcacataacgtcgtgattggcgacaatacggcggttgccggtggcgtcattatggcgggcagcctgaaaattggtcgttactgcatgatcggcggagccagcgtaatcaacgggcatatggaaatatgcgacaaagtgacggttacgggcatgggtatggtgatgcgtcccatcactgaaccaggcgtctattccagtggcattccgctgcaacccaacaaagtctggcgcaaaaccgctgcactggtgatgaacattgatgacatgagcaagcgtctgaaaagccttgagcgcaaggttaatcaacaagactaacgttccatcttttgttcgccaaactttacggcctgtctcattcttacgattgcggcaggccgtgttattattgtcgtttcttatattttgacaggaagagtatcttgactactaacactcatactctgcagattgaagagattttagaacttctgccgcaccgtttcccgttcttactggtggatcgcgtgctggattttgaagaaggtcgttttctgcgcgcagtaaaaaatgtctctgtcaatgagccattcttccagggccatttccctggaaaaccgattttcccgggtgtgctgattctggaagcaatggcacaggcaacaggtattctggcgtttaaaagcgtaggaaaactggaaccgggtgagctgtactacttcgctggtattgacgaagcgcgcttcaagcgcccggtcgtgcctggcgatcaaatgatcatggaagtcactttcgaaaaaacgcgccgcggcctgacccgttttaaaggggttgctctggtcgatggtaaagtagtttgcgaagcaacgatgatgtgtgctcgtagccgggaggcctgatacgtgattgataaatccgcctttgtgcatccaaccgccattgtggaagagggcgcgagtattggcgcgaacgcacacattggtcctttttgtatcgttggaccccatgtcgaaattggtgagggtaccgtactgaaatctcacgttgtcgtgaatggtcatactaaaattggccgcgataatgagatttatcagttcgcctccatcggcgaagttaaccaggatctgaaatatgctggcgaaccgacccgtgtggaaatcggcgatcgtaaccgcattcgcgaaagcgtcaccattcatcgtggcacagtccagggcggtggattgacgaaggtgggcagcgacaacttactgatgatcaacgcgcacattgcgcacgattgtacggtaggtaaccgctgtattctcgccaacaacgcaacgctggcgggtcacgtaagcgttgacgacttcgcgatcatcggcggcatgaccgcagtccatcagttctgcatcattggtgcgcacgtgatggttggcggctgctccggtgtggcgcaggacgtccctccttatgtcattgcgcagggtaaccacgcaacgccgttcggtgtcaatatcgaagggctgaagcgccgcggattcagccgtgaggcgattaccgctatccgcaatgcgtataagctgatttatcgtagcggtaaaacgctcgatgaagtgaaaccggaaattgctgaactggcggaaacatatccggaagtgaaagcctttaccgatttctttgcacgcagtacgcgcggtctgattcgttaatgactgaacagcgtccattaacgattgccctggtcgccggagaaacctccggcgatatcctgggggccggtttaatccgcgctctgaaagaacatgtgcccaacgcccgctttgttggtgttgccgggccacgaatgcaggctgaaggctgcgaagcctggtacgaaatggaagaactggcggtgatgggcattgttgaagtgctcggtcgtctgcgtcgcttactgcatattcgtgccgatctgacaaagcgttttggcgaactgaagccagatgtttttgttggtattgatgcgcctgacttcaatattactcttgaaggtaacctcaaaaagcagggtatcaaaaccattcattacgtcagtccgagtgtctgggcgtggcgacagaaacgtgttttcaaaataggcagagccaccgatctggtgctcgcatttctgcctttcgaaaaagcgttttatgacaaatacaacgtaccgtgccgctttatcggtcataccatggctgatgccatgccattagatccagataaaaatgccgcccgtgatgtgctggggatccctcacgatgcccactgcctggcgttgctaccggggagccgtggtgcagaagttgaaatgcttagtgccgatttcctgaaaacggcccagcttttgcgccagacatatccggatctcgaaatcgtggtgccactggtgaatgccaaacgccgcgagcagtttgaacgcatcaaagctgaagtcgcgccagaccttagtgttcatttgctggatgggatgggccgtgaggcgatggtcgccagcgatgcggcgctactggcgagcggtacggcagccctggagtgtatgctggcgaaatgcccgatggtggtgggatatcgcatgaagccttttaccttctggttggcgaagcggctggtgaaaactgattatgtcagcctgccaaatctgctggcgggcagagagttagtcaaagaattattgcaggaagagtgtgagccgcaaaaactggctgcggcgctgttaccgctgttggcgaacgggaaaaccagccacgcgatgcacgataccttccgtgaactgcatcagcagatccgctgcaatgccgatgagcaggcggcacaagccgttctggagttagcacaatgatcgaatttgtttatccgcacacgcagctggttgcgggtgtggatgaagtcggacgcgggccgttagttggcgcggtcgtcaccgctgcggtgatccttgacccggcgcgcccgattgccgggctgaatgattccaaaaagctgagcgaaaaacgccgtctggcgctctatgaagagatcaaagagaaagcgttgagctggagtctgggccgcgcggaaccccacgaaatcgacgagctgaacattcttcatgcgaccatgctggcgatgcagcgtgccgtcgctgggctgcatattgcgccggaatatgtgttgattgatggtaaccgctgcccgaaattaccgatgcctgcgatggctgtggtgaaaggcgatagccgcgtaccggaaatcagtgccgcgtctatcctggcgaaagtgacgcgtgacgccgaaatggcggcgctggatattgttttcccgcaatatggttttgcccaacacaaagggtacccaaccgcttttcatctggaaaaactggctgaacacggcgcgaccgaacaccatcggcgcagctttgggcctgtcaaacgcgcactgggacttgcgtcctgattcttgtgtcgagattaagtaaaccggaatctgaagatgtctgaaccacgtttcgtacacctgcgggtgcacagcgactacagcatgatcgatggcctggccaaaaccgcaccgttggtaaaaaaggcggcggcgttgggtatgccagcactggcgatcaccgatttcaccaacctttgtggtctggtgaagttctacggagcgggacatggcgcagggattaagcctatcgtcggggcagattttaacgtccagtgcgacctgctgggtgatgagttaacccacctgacggtactggcggcgaacaataccggctatcagaatctgacgttgctgatcagtaaagcgtatcagcgcgggtacggtgccgccgggccgatcatcgatcgcgactggcttatcgaattaaacgaagggttgatccttctttccggcggacgcatgggcgacgtcggacgcagtcttttgcgtggtaacagcgcgctggtagatgagtgtgtcgcgttttatgaagaacacttcccggatcgctattttctcgagctgatccgcaccggcaggccggatgaagaaagctatctgcacgcggcggtggaactggcggaagcgcgcggtttgcccgtcgtggcgaccaacgacgtgcgctttatcgacagcagcgactttgacgcacacgaaatccgcgtcgcgatccacgacggctttaccctcgacgatcctaaacgcccgcgtaactatagcccgcagcaatatatgcgtagcgaagaggagatgtgtgagctgtttgccgacatccccgaagcccttgccaacaccgttgagatcgccaaacgctgtaacgtaaccgtgcgtcttggtgaatacttcctgccgcagttcccgaccggggacatgagcaccgaagattatctggtcaagcgtgcaaaagagggcctggaagagcgtctggcctttttattccctgatgaggaagaacgtcttaagcgccgcccggaatatgacgaacgtctggagactgaacttcaggttatcaaccagatgggcttcccgggctacttcctcatcgttatggaatttatccagtggagcaaagataacggcgtaccggtagggccaggccgtggctccggtgcgggtagtctggtggcctacgcgctgaaaatcaccgacctcgatccgctggaatttgacctgctgttcgaacgtttccttaacccggaacgtgtctccatgcctgacttcgacgttgacttctgtatggagaaacgcgatcaggttatcgagcacgtagcggacatgtacggtcgtgatgcggtaagccagatcatcaccttcggtacaatggcggcgaaagcggtgatccgcgacgtaggccgcgtgctggggcatccgtacggctttgtcgatcgtatcagcaaactgatcccgcccgatccggggatgacgctggcgaaagcgtttgaagccgagccgcagctgccggaaatctacgaagcggatgaagaagttaaggcgctgatcgacatggcgcgcaaactggaaggggtcacccgtaacgccggtaagcacgccggtggggtggttatcgcgccgaccaaaattaccgattttgcgccgctttactgcgatgaagagggcaaacatccggtcacccagtttgataaaagcgacgttgaatacgccggactggtgaagttcgacttccttggtttgcgtacgctcaccatcatcaactgggcgctggagatgatcaacaagcggcgggcgaagaatggcgagccgccgctggatatcgctgcgatcccgctggatgataagaaaagcttcgacatgctgcaacgcagcgaaaccacggcggtattccagcttgaaagccgcggcatgaaggacctgatcaagcgtctacaacctgactgcttcgaagatatgatcgccctagtggcactgttccgccccggtccgttgcaaagtgggatggtggataactttatcgaccgtaaacatggtcgtgaagagatctcctatccggacgtacagtggcagcatgaaagcctgaaaccggtactggagccaacctacggcattatcctgtatcaggaacaggtcatgcagattgcgcaggtgctttctggttataccctcggtggcgcggatatgctgcgtcgtgcgatgggtaagaaaaagccggaagagatggctaagcaacgttctgtatttgctgaaggtgcagaaaagaacggaatcaacgctgaactggcgatgaaaatcttcgacctggtggagaaattcgctggttacggatttaacaaaagccactctgcggcctatgctttggtgagttatcaagcgttatggctgaaagcgcactatcctgcggagtttatggcggcggtaatgaccgccgatatggacaacaccgagaaggtggtgggtctggtggatgagtgctggcggatggggctgaaaatcctgccaccagatataaactccggtctttaccatttccacgtcaacgacgacggcgaaatcgtgtatggtattggcgcgatcaaaggggtcggtgaaggtccgattgaggccatcatcgaagcccgtaataaaggcggctacttccgcgaactgtttgatctctgcgcccgtaccgacaccaaaaagttgaaccgtcgcgtgctggaaaaactgatcatgtccggggcgtttgaccgtcttgggccacatcgcgcagcgctgatgaacagcctgggcgatgcgttaaaagcggcagatcaacacgcgaaagcggaagctatcggtcaggccgatatgttcggcgtgctggccgaagagccggaacaaattgaacaatcctacgccagctgccaaccgtggccggagcaggtggtattagatggggaacgtgaaacgttaggcctgtacctgaccggacaccctatcaaccagtatttaaaagagattgagcgttatgtcggaggcgtaaggctgaaagacatgcacccgacagaacgtggtaaagtcatcacggctgcggggctcgttgttgccgcgcgggttatggtcaccaagcgcggcaatcgtatcggtatctgcacgctggatgaccgttccgggcggctggaagtgatgttgtttactgacgccctggataaataccagcaattgctggaaaaagaccgcatacttatcgtcagcggacaggtcagctttgatgacttcagcggtgggcttaaaatgaccgctcgcgaagtgatggatattgacgaagcccgggaaaaatatgctcgcgggcttgctatcagcctgacggacaggcaaattgatgaccagcttttaaaccgactccgtcagtctctggaaccccaccgctctgggacaattccagtacatctctactatcagagggcggatgcacgcgcgcggttgcgttttggcgcgacgtggcgtgtctctccgagcgatcgtttattaaacgatctccgtggcctcattggtagcgagcaggtggaactggagtttgactaatacaggaatactatgagtctgaatttccttgattttgaacagccgattgcagagctggaagcgaaaatcgattctctgactgcggttagccgtcaggatgagaaactggatattaacatcgatgaagaagtgcatcgtctgcgtgaaaaaagcgtagaactgacacgtaaaatcttcgccgatctcggtgcatggcagattgcgcaactggcacgccatccacagcgtccttataccctggattacgttcgcctggcatttgatgaatttgacgaactggctggcgaccgcgcgtatgcagacgataaagctatcgtcggtggtatcgcccgtctcgatggtcgtccggtgatgatcattggtcatcaaaaaggtcgtgaaaccaaagaaaaaattcgccgtaactttggtatgccagcgccagaaggttaccgcaaagcactgcgtctgatgcaaatggctgaacgctttaagatgcctatcatcacctttatcgacaccccgggggcttatcctggcgtgggcgcagaagagcgtggtcagtctgaagccattgcacgcaacctgcgtgaaatgtctcgcctcggcgtaccggtagtttgtacggttatcggtgaaggtggttctggcggtgcgctggcgattggcgtgggcgataaagtgaatatgctgcaatacagcacctattccgttatcagcccggaaggttgtgcgtccattctgtggaagagcgccgacaaagcgccgctggcggctgaagcgatgggtatcattgctccgcgtctgaaagaactgaaactgatcgactccatcatcccggaaccactgggtggtgctcaccgtaacccggaagcgatggcggcaagcttgaaagcgcaactgctggcggatctggccgatctcgacgtgttaagcactgaagatttaaaaaatcgtcgttatcagcgcctgatgagctacggttacgcgtaattcgcaaaagttctgaaaaagggtcacttcggtggcccttttttatcgccacggtttgagcaggctatgattaaggaaggattttccaggaggaacacatgaacatcattgccattatgggaccgcatggcgtcttttataaagatgagcccatcaaagaactggagagcgcgctggtggcgcaaggctttcagattatctggccacaaaacagcgttgatttgctgaaatttatcgagcataaccctcgaatttgcggcgtgatttttgactgggatgagtacagtctcgatttatgtagcgatatcaatcagcttaatgaatatctcccgctttatgccttcatcaacacccacagcacgatggatgtcagcgtgcaggatatgcggatggcgctctggttttttgaatatgcgctggggcaggcggaagatatcgccattcgtatgcgtcagtacaccgacgaatatcttgataacattacaccgccgttcacgaaagccttgtttacctacgtcaaagagcggaagtacaccttttgtacgccggggcatatgggcggcaccgcatatcaaaaaagcccggttggctgtctgttttatgatttttcggcgggaatactcttaaggctgatgtctctattagcgtcaccgagcttggtagcttgctcgaccacaccgggccacacctggaagcggaagagtacatcgcgcggacttttggcgcggaacagagttatatcgttaccaacggaacaagcacgagcaacaaaattgtgggtatgtacgccgcgccatccggcagtacgctgttgatcgaccgcaattgtcataaaagcctggcgcatctgttgatgatgaacgatgtagtgccagtctggctgaaaccgacgcgtaatgcgttggggattcttggtgggatcccgcgccgtgaatttactcgcgacagcatcgaagagaaagtcgctgctaccacgcaagcacaatggccggttcatgcggtgatcaccaactccacctatgatggcttgctctacaacaccgactggatcaaacagacgctggatgtcccgagcattcacttcgattctgcctgggtgccgtacacccattttcatccgatctaccagggtaaaagtggtatgagcggcgagcgtgttgcgggaaaagtgatcttcgaaacgcaaagcacccacaaaatgctggcggcgttaagccaggctagcctgatccacattaaaggcgagtatgacgaagaggcctttaacgaagcctttatgatgcataccaccaccagccccagttatcccattgttgctagcgttgagacggcggcggcgatgctgcgtggtaatccgggcaaacggctgattaaccgtagtgtagaacgagctctgcattttcgcaaagaggtccagcggctgcgggaagagtctgacggttggtttttcgatatctggcaaccgccgcaggtggatgaagccgaatgctggcccgttgcgcctggcgaacagtggcacggctttaacgatgcggatgccgatcatatgtttctcgatccggttaaagtcactattttgacaccggggatggacgagcagggcaatatgagcgaggaggggatcccggcggcgctggtagcaaaattcctcgacgaacgtgggatcgtagtagagaaaaccggcccttataacctgctgtttctctttagtattggcatcgataaaaccaaagcaatgggattattgcgtgggttgacggaattcaaacgctcttacgatctcaacctgcggatcaaaaatatgctacccgatctctatgcagaagatcccgatttctaccgcaatatgcgtattcaggatctggcacaagggatccataagctgattcgtaaacacgatcttcccggtttgatgttgcgggcattcgatactttgccggagatgatcatgacgccacatcaggcatggcaacgacaaattaaaggcgaagtagaaaccattgcgctggaacaactggtcggtagagtaagcgcaaatatgatcctgccttatccaccgggcgtaccgctgttgatgcctggagaaatgctgaccaaagagagccgcacagtactcgattttctactgatgctttgttccgtcgggcaacattaccccggttttgaaacggatattcacggcgcgaaacaggacgaagacggcgtttaccgcgtacgagtcctaaaaatggcgggataacttgccagagcggcttccgggcgagtaacgtgctgttaacaaataaaggagacgttatgctgggtttaaaacaggttcaccatattgcgattattgcgacggattatgcggtgagcaaagctttctactgcgatattcttggtttcacgctgcaaagcgaagtctatcgcgaagcgcgcgacagttggaaaggggatttggcgcttaatgggcaatatgtgattgagcttttcagttttccgttcccgccggaacgacccagccgaccggaagcttgcggtctgcgtcatctggcttttagcgttgatgacatcgatgcggcagtggcgcaccttgaaagccataacgtgaagtgtgaaaccatccgtgtcgatccatacacgcaaaaacgcttcaccttctttaacgatccggacgggctgccgttggaactgtatgagcagtaaggcttgtcatcgccgcatttgcccggtaacgtgccgggcattgctactgtaaaatcgcaccatcatgacactcacgctcaatagacaacttctcaccagtcgccagattctggtggcctttagcggcgggcttgactccaccgttctgctgcatcagttggtgcagtggcggacggaaaatccgggtgtcgctctgcgcgctattcatgtgcatcacggtttaagtgccaatgccgatgcctgggttacgcattgcgaaaacgtctgccaacagtggcaggtgccgctggtggtcgaacgcgtacaacttgcgcaagaaggactgggcattgaggcccaggcgcggcaggcacgttatcaggcatttgcccgcaccttgttgcccggtgaagtgctggtcaccgcgcaacatctcgacgatcaatgtgaaacctttctgctggcgctaaaacgcggcagtggccctgccgggcttagcgctatggcggaagtcagcgagtttgccggaacgcggcttattcgcccgttgctcgcccgcacgcggggggaactggtgcagtgggcgcgtcagtatgatttacgctggattgaagacgaaagtaatcaggacgacagttacgatcgtaactttctgcgcctgcgcgtagtgccgttattgcagcagcgttggccgcattttgccgaagcaacggcccgcagcgccgcactttgtgctgaacaagagagcctgctggatgaactgctggcagatgatttagcacactgtcaaagcccgcaggggacgctgcagattgtgccaatgctggcgatgagtgatgcccgccgcgcggcgattatccgccgctggctggcagggcagaatgcaccgatgccttcccgcgacgcgttggtgaggatctggcaggaagtggcgctggcgcgggaagatgccagtccctgtttacgtttgggcgcgtttgaaatccgacgctatcagagccaactgtggtggattaaatccgtcaccgggcaaagcgaaaacattgtgccgtggcagacgtggcttcaaccgctggaattaccggcggggctgggaagtgtacagcttaatgcgggaggcgatattcgccctccgcgtgcagacgaagcggtcagcgtgcgtttcaaagcgccaggattgctgcatattgtcgggcgtaacggcggacgtaagctaaagaaaatctggcaagagctgggcgtgccgccgtggctacgtgacaccacgccactgctgttttatggcgaaacgctgattgcggcggcaggggtatttgtgacgcaagaaggtgtggctgaaggtgagaatggcgtaagttttgtctggcagaaaacgcttagttaagtgaaagccggataagacgcatcaaacgtcgcatccggcgaaagtcaatcaggattcgcttaccaccaccgtaccgatttccgggtggctaaagctggtaattttatccagacgcagctcgcgggtttcgccagcggcctcgacgaccaggtactccacatttttgcgggagactaaatcactggcttttgcctgcaatttttcgccatctttcagctcaagtgtcagcattaaatgatgctggcaggcgagctcaagattatcgtaatcatcacaattgattggttgatacgtatcattcattgacataatcgctcaccagtaagtttgccgcagcgtatgctgctttttccctgacagcctcagaaagggcgtcgtcggcagccatttcattcagcactttcaaaacgcagcccagcgcgtccggaacgtatcctaagtctccgctggcgatttccgcgtaccgcttgcgtattaactcacaatatttttccacatgccctcctgtcagcactctgacttaaccgtggatgcaagtctaagcctacgaagataaactctgtttcgcaaggtgactataccacactcatttctgcaatatcagcgccgcaactgcacgtattccgttacaatggcctcctgattcgaaaggagttttcttatggcgcttaaagcgacaatttataaagcgacggttaatgtggccgatctcgaccgcaaccagtttctcgatgcctctctgacgctggcgcgccatcctagtgaaacccaggagcgtatgatgctgcgcttgctggcgtggctgaaatatgctgatgaacgtctgcaatttacccgtggtttgtgtgccgatgatgagccggaagcgtggctgcgtaacgatcacctgggcattgatttgtggattgagctggggctgccggatgagcggcggattaagaaagcctgcacccaggccgcagaagtggcgctgtttacctataatagtcgggcggcgcaaatctggtggcagcaaaatcagagcaaatgtgtgcagtttgccaatctttccgtctggtatctggacgatgaacaactggcgaaagtaagcgcctttgccgatcgtaccatgacgctgcaggcaacgattcaggatggcgtgatctggttaagcgatgataagaataatctggaagtgaacttaaccgcctggcaacaacctagttgaactaaaccgcctggcaacaaccttcatgattgtgatttcccgacatgttgctattcccgatggtgagcttgagatcaccgccattcgtgcgcagggcgcgggcgggcagcatgttaataagaccagtacggctattcatctgcgttttgacattcgggcgtccagcctgccagagtattacaaagagcgtctgctcgccgccagccatcatttgatcagcagtgatggcgtgattgtcattaaggcacaggaataccgcagtcaggaactgaaccgcgaagcagctctggcccggctggtggctatgattaaagaattaacaacagaaaaaaaagcccgacgacccacgcggcccacccgtgcaagcaaagagcgcaggctggcaagcaaagcacaaaaaagtagcgtgaaggcgatgcgcggcaaagtgcgcagcggtcgggaataaaaagaaggaatggatggtgaaaaaagcgatagtgacagcgatggctgtaatcagcctctttactctgatgggatgtaataatcgggccgaagtcgatacgctttctccggcgcaggctgccgaactgaaaccgatgccgcaaagttggcgcggcgtgctgccgtgtgccgattgcgaaggaatcgaaacctctctgttcctcgaaaaagacggaacatgggtgatgaatgagcgttatctcggtgctcgtgaagaaccttcctccttcgcttcctacggtacatgggcgcgaaccgctgacaagctggtattaaccgacagcaaaggtgaaaagagttattatcgggcgaaaggcgatgcgctggagatgctcgatcgtgaaggcaatccgattgaaagccagttcaactatacgctggaagcggcacaatccagtttacctatgacgccgatgaccctgcggggcatgtatttttatatggctgatgcggcgaccttcactgattgcgcgaccggaaaacgtttcatggtagcgaataacgcagagctggagcgtagctacctggctgcgcgcggtcacagtgaaaaaccggtgttactgagtgtagaaggtcactttacgcttgagggtaatccggataccggtgcgccgactaaagtattggcacccgatacggcagggaaattttaccccaaccaggattgcagtagtttggggcagtaacccgtcttgagacagaaacaaacgcaaaacaggccagaaggatatatttcaacattttgaatttgcacgttttttgtaggccggataaggcgtttacgccgcatccggcaatggtgctcaacgcctgatgcgacgctggcgcgtcttatcatgcctacaacccccctcataccttaaggcggataaggcatttactttatcaccgggtcaaaccaacaaagcgacccgccttgatataaatcccaggcttcaggtgcccaacatactgtaactgcgtttctggcttaaacgcagagacatcaccaatacgcatatgcatcagatcggcagggctaatccagccgctttgcgccagtgtaagtggatgcccggctttggcaaaggcatccgtgacaaattcgctacaaaaccagctctttttgtctccttcgcccacactgcttaactgcgctttcgccaggccgctgacgcactgttggcgaaaatcctcggagaacggattcagactgcacatctggcgagtcaccataaagggaataaattcgacaatgccgcgatagttataaccgctatctttgattttattggcaaacgcggtgatatctgtggcttgttgcggggtaagatccgggactcgtaagacgaaaagcttatcactatgcttcatcgcttttttaagggaaacgatctggacgccagcgcctgtcgcttctgcaacgttattatcacccagaaagattgcaacgtgactcacagaggaagtgctgaagacgcggattccaaaactggttaccccaaggctactggagaacagcaaatcgccgggtttgagatcaggtgccgttatttcttttatactttgttcggtgaaagagctttgatgctggaatttgacagcccatgtttttgcctcggcatctactgctgtggcacttgggtctggctggctgatatcaacggtacaagcgctaagtaaaagaaagctggggagaaacaggcggcagtacgcctttggtttatccattttatacaatccatgtaaaaaaagggccctgaaattcaggaccctttctggcatcagcctttaatctgtttcaccagatattcgacgatgtcaccagtcttaattaactgtttctcgccgttgcgacgatatttatattcgatatcgtcgttgtcgaggttacggtcgcccagcacaatagtgtgcggaataccgatcagttccatatcagcaaacatcacgcccggacgctctttgcggtcatccagcagcacttcgataccttgtgcacgcagttcgctgtacagtttctcagcaagctcttgtacgcggaaggatttgtgcatgttcatcggcagaatcgccacctggaacggcgcgatagcgtcaggccatacgatgcctcgttcgtcgtagttctgctcaatcgccgcagctaccacacgcgttaccccgataccgtagcaacccatcgtcaggatttggttacggccatcttcaccctgtacggaggctttcagtgcttcggagtacttggtacccagctggaagatgtgaccaacttcgataccacgtttgatcagcagcctaccctggccatccgggcttggatcgccagccaccacgttacggatatctgcaacttccggggtagcgacatcgcgatcccagttgatgccgaagtagtgtttaccatcgatgttagcaccagcagcgaaatcactcatcgccgcaacggtacggtcaatcaccaccggaatcggcatgtttaccggacccagactacccggaccggctttaaccacggcacgaatttcttcttcggtcgcgaaagtcagcgggcttgcaacctgcggcagtttttctgctttaacttcgttcagctcgtgatcaccgcgcaccagcagcgcaacctgcgggaagctgctgccttcaaccgctttaaccagcagagtcttaaccgttttctcaatcggcagattgaactgttcaaccagttccgcgatggttttcgcgttcggcgtatcaaccagcgtcatttcctgggtagcagcagcgcgcggttctttcggcgcgatagcttctgccagttcaatgttcgctgcatagtcagaggtgtcggagaagaccacatcgtcttcaccgctctgcgccagcacctggaattcgtgagaggcgctgccgccgatagaaccggtgtcggcttgtacggcgcggaaatccagccccatgcggctgaagattttgctgtaggccgcatacattgcatcgtaggtttcctgcagggattcctgagaagtatggaaagagtaagcatctttcatcaggaattcgcgggaacgcatgacgccgaaacgcggacgcacttcgtcgcggaacttggtctggatctgatagaagttcagcggcagctgtttgtaagagctaagctcgttacgaatcaggtcagtgataacttcttcatgagttgggccgagtacgaacggacgctcgccacggtcaacaaaacgcagcagttccggaccgtactgttcccaacgaccactctcttgccacaaatcggctggctgaaccaccggcatgctcacctcgatcgcaccggcgttgttcatctcttcacgcacgatgttttcgacttttttcagaacgcgcacgccggtcggcagccaggtatataacccggaggccagcttgcggatcatcccggcgcgcagcatcagctgatggctgatcacctcggcgtcggcaggtgtctccttgagagtggagagcaggtattggctagtacgcatgttgttacggttccagttggaaggtagaacaggctcaaggcgagcctgggacaaaaaaagtgatttagtttaccagtgcaaaagaaatgtcaaaagagaagggcgtgaatttaacgcggttccagcgcaaagacttcaaaacctgcgtcggtgacgcgccagcgaacgttaaaatcatgtagccagacggcataggttttgcccgtttcctcacctttacgataggccgggcgcgggtcctgcgccagtacttcgcggataaacagcgttaactgcggataacgcttctccagcgtcaaaagctgcttttcgacctctgcggtaaaactcaccgccatctctgcagctggcgcactttgcgcatagctggcactggcatcgggaaggctttcggcaaaggggagatacggtttgatatccactaccggcgtaccatcgaccagatccagactgccgagcttcagaatcacgctgtctttatggcaaacaacctctttcagctctaccaggctcatgccaattgggttagggcggaaagtagagcgtgttgcgaaaacccccattctggcgttaccgccgaggcgcggtggacgcacagtcggacgccagccgccttccatcgtttgatgaaagacgaaaaggatccataaatggctgaacgcttccaggccgcgaacggcgtcggcctggttgtagggagcaatgagatgcagttcgccgttggcgctttttaccagacctggctggcgcggaacggcgaacttttctttataggggctgcgaataacgcctatttgctcgaactggaaactgctcatttcgccgtaatgttaagcgcagaaccgatacatacagcctgacgatagcagcctggcgtaccgctggtgacttcgcagctatgcagtaatacagcattggctttcattttagaggcgttgatttgcatccgcttacgtgcggttggaatgctcggcggagagtcctgattagaggcctggcaagagtcgccactgacttcaccgagatcgcggaacggtttgccgactaattcttctgcattggtataaattcggaccggcgtggcgcgcggcgctttcggttttgcaggctccgctttcggctggggtgcagtgctttgaacgggttcgacaggggatctgcttaacatggaacagccgcttagcatgagtgctactaaacagatcggtaaagcacgcatagtatttcctcaatgtatgatcaaaacgtcaatattgaatcaggagcttgtaaaaatgacaagacgggcaagcgcccgtcctgaatgatattacaaattgtggaaacagcctaaaaattaccagcctttaacagctccgccgttaaacactttgtttgctgcttcgtaaacttcgtcagactgataagcctggacgaatttcttcacgttctcggcgtctttgttatcttcacgcgtcacgatcaggtttacgtacggggactctttatcttcaacaaagataccgtctttcgccggagtcaggccaatctggctggcataggtggtattgataactgccagagcgatttgcgcgtcgtccagagaacgcggcagttgcggtgcttccagttcaacaattttcagatttttggggttctcaacaacatcaagaacggtcggcagcaggccaacgccatctttcagtttgatcaagcccactttttgcagcagcagcagactacgaccaaggttagttgggtcgtttggcacggcaacctggctaccatcctgcagttcatccagacttttgattttcttggagtaaccagcaatcggataaacaaaagtgttgcctactgcgaccagtttgtagccacgatctttcagttgctgatcaaggtacggtttatgctggaaggcgttggcgtcgatatcgcctttgctcaatgcttcgtttggcagaacatagtcgttgaaggttaccagctcaacgtccaggccatatttgtctttcgcaactttctgcgcgacttctgcaacctgctgttcggcaccaacaatcacgccgactttaatgtggtttggatctttttcatcctgaccgcagcctaccagtgccagacttccgatcagggctcccactgccgcaaaggttttgaatttgaacgccataccttattccttcttcaattatttatgttgtgttgaacgttacttgcgagtgacagcccggacgatgcggtcgcctgcgaactgaattaaataaaccagaatgaccagcaataccagtaccgtattcatcaccgtcgcgttatagccgatgtagccatactgatagccaatctgacctaaaccaccggcaccgactgcaccacccatcgcggaataaccgaccagggtaatcagggtgatagttgccgcattcaccagacccggcagcgcttccggtaacagcaccttacggacgatctgcatcggcgtggcacccattgcgcgggaagcttcaattaacccggttgggatctccagcagagcgttctcgaccatacgggcaataaacggtgctgcaccaacggttaacggaacaatcgctgcctgcaaaccaatgcttgtaccgacaataacgcgggtaaacggaatcatccatacaagcaagataatgaacgggatggaacggaaaatgttcacaatcgcagaaacggtacgatacagcttcgcgttagcaataatttgccccggacgcgtgacataaagcagaacgccaaccggcagaccaatcacaaagccaaaaaaaccggatacgaaggtcattgccagcgtttcccatacgccacgaaccagcagccacatcatcggctcagacataacccagtacctctacttttacatggtgttcctgcagccaggcaatggcggcttgcgtatcttgttgtgtgccgtgcatttcagtcagcatgatgccgaacttaacgccaccggcgtaatccatctgcgcgctaataatgttgttgttgacgttgaaacgacgcgcggtttcagaaagcagtggggcatcgacgctttgaccggtaaactccagacgcagcatcggcacgcagtcagtaaatggctccgcttgcagacgttcctggtaatcttccgggatatccagatgcagggtgctctgaataaacttctgcgccagcggcgttttcggatggctgaacacttcacttaccgtgtcctgctcgatcagttctccattgctgatgaccgccacgcaatcacaaatgcgcttcacaacgtccatttcgtgggtgatcaacagaatcgtcaaccccagacggcggttgatgtctttcagcagttcgagaatagaacgtgtcgttgccgggtccagcgcgctggtggcttcatcacacagcaatactttgggattgctggctaacgcacgggcaattgccacacgttgtttctgcccaccggaaagattgctcgggtagctatcatgcttatcgccaagaccaaccaaactcagcaattccgtcacgcgacgtttgacctcgtctttcggtgtgttgtccagctccagcggcagagccacgttgccaaaaacagtacggctagagagcaggttaaaatgctggaaaatcataccaatctggcggcgagctttggtcaactcggattcactcagcgtggtcagttcctggccatcgaccagcacgctaccctcggttgggcgctccagcaggtttacacaacgtataagcgtactcttacccgcgccactggcaccgataacgccataaatttgtccagctggcacatgcaggctgacgttgttcaacgcctggatggtgcgggtgccctggtggaacactttggtgatattgctaagttttatcattgattatttattatcgtcattaagttagtcgtggcatctcgaatgcctgaaacgggcaacgccgtcaatgaaatggatgttaaggcatccagacgtctaaatcaatcaggtttatgcgaagagcactttcttgcaggtcgaaacatgcgatactagcgtcacatgccttattaaggagctataaaaggtggcgaagagcgtacccgcaatttttcttgaccgtgatggcaccattaatgtcgatcacggctatgtccatgagatcgacaactttgaatttatcgacggtgttattgacgccatgcgcgagctaaaaaaaatgggctttgcgctggtggtagtaaccaaccagtctggcattgctcgcggtaaatttaccgaagcacagtttgaaacgctgaccgagtggatggactggagcctggcggaccgagatgtcgatctggatggtatctattattgcccgcatcatccgcagggtagtgttgaagagtttcgccaggtctgcgattgccgcaaaccacatccggggatgcttttgagtgcacgcgattatttgcatattgatatggccgcttcttatatggtgggcgataaattagaagatatgcaggcagcggttgcggcgaacgtgggaacaaaagtgctggtgcgtacgggtaaacctattacgcctgaagcagaaaacgcggcggattgggtgttaaatagcctggcagacctgccgcaagcgataaaaaagcagcaaaaaccggcacaatgattaaaagatgagcggttgaaataaaaatgcatttttccgcttgtcttcctgagccgactccctataatgcgcctccatcgacacggcggatgtgaatcacttcacacaaacagccggttcggttgaagagaaaaatcctgaaattcagggttgactctgaaagaggaaagcgtaatatacgccacctcgcgacagtgagctgaaagccgcgtcgcaactgctctttaacaatttatcagacaatctgtgtgggcactcgaagatacggattcttaacgtcgcaagacgaaaaatgaataccaagtctcaagagtgaacacgtaattcattacaaagtttaattctttgagcatcaaacttttaaattgaagagtttgatcatggctcagattgaacgctggcggcaggcctaacacatgcaagtcgaacggtaacaggaagaagcttgcttctttgctgacgagtggcggacgggtgagtaatgtctgggaaactgcctgatggagggggataactactggaaacggtagctaataccgcataacgtcgcaagaccaaagagggggaccttcgggcctcttgccatcggatgtgcccagatgggattagctagtaggtggggtaacggctcacctaggcgacgatccctagctggtctgagaggatgaccagccacactggaactgagacacggtccagactcctacgggaggcagcagtggggaatattgcacaatgggcgcaagcctgatgcagccatgccgcgtgtatgaagaaggccttcgggttgtaaagtactttcagcggggaggaagggagtaaagttaatacctttgctcattgacgttacccgcagaagaagcaccggctaactccgtgccagcagccgcggtaatacggagggtgcaagcgttaatcggaattactgggcgtaaagcgcacgcaggcggtttgttaagtcagatgtgaaatccccgggctcaacctgggaactgcatctgatactggcaagcttgagtctcgtagaggggggtagaattccaggtgtagcggtgaaatgcgtagagatctggaggaataccggtggcgaaggcggccccctggacgaagactgacgctcaggtgcgaaagcgtggggagcaaacaggattagataccctggtagtccacgccgtaaacgatgtcgacttggaggttgtgcccttgaggcgtggcttccggagctaacgcgttaagtcgaccgcctggggagtacggccgcaaggttaaaactcaaatgaattgacgggggcccgcacaagcggtggagcatgtggtttaattcgatgcaacgcgaagaaccttacctggtcttgacatccacagaactttccagagatggattggtgccttcgggaactgtgagacaggtgctgcatggctgtcgtcagctcgtgttgtgaaatgttgggttaagtcccgcaacgagcgcaacccttatcttttgttgccagcggtccggccgggaactcaaaggagactgccagtgataaactggaggaaggtggggatgacgtcaagtcatcatggcccttacgaccagggctacacacgtgctacaatggcgcatacaaagagaagcgacctcgcgagagcaagcggacctcataaagtgcgtcgtagtccggattggagtctgcaactcgactccatgaagtcggaatcgctagtaatcgtggatcagaatgccacggtgaatacgttcccgggccttgtacacaccgcccgtcacaccatgggagtgggttgcaaaagaagtaggtagcttaaccttcgggagggcgcttaccactttgtgattcatgactggggtgaagtcgtaacaaggtaaccgtaggggaacctgcggttggatcacctccttaccttaaagaagcgtactttgcagtgctcacacagattgtctgatgaaaatgagcagtaaaacctctacaggcttgtagctcaggtggttagagcgcacccctgataagggtgaggtcggtggttcaagtccactcaggcctaccaaatttgcacggcaaatttgaagaggttttaactacatgttatggggctatagctcagctgggagagcgcctgctttgcacgcaggaggtctgcggttcgatcccgcatagctccaccatctctgtagtggttaaataaaaaatacttcagagtgtacctgcaaaggttcactgcgaagttttgctctttaaaaatctggatcaagctgaaaattgaaacactgaacaatgaaagttgttcgtgagtctctcaaattttcgcaacacgatgatggatcgcaagaaacatcttcgggttgtgaggttaagcgactaagcgtacacggtggatgccctggcagtcagaggcgatgaaggacgtgctaatctgcgataagcgtcggtaaggtgatatgaaccgttataaccggcgatttccgaatggggaaacccagtgtgtttcgacacactatcattaactgaatccataggttaatgaggcgaaccgggggaactgaaacatctaagtaccccgaggaaaagaaatcaaccgagattcccccagtagcggcgagcgaacggggaggagcccagagcctgaatcagtgtgtgtgttagtggaagcgtctggaaaggcgcgcgatacagggtgacagccccgtacacaaaaatgcacatgctgtgagctcgatgagtagggcgggacacgtggtatcctgtctgaatatggggggggaccatcctccaaggctaaatactcctgactgaccgatagtgaaccagtaccgtgagggaaaggcgaaaagaaccccggcgaggggagtgaaaaagaacctgaaaccgtgtacgtacaagcagtgggagcatgcttaggcgtgtgactgcgtaccttttgtataatgggtcagcgacttatattctgtagcaaggttaaccgaataggggagccgaagggaaaccgagtcttaactgggcgttaagttgcagggtatagacccgaaacccggtgatctagccatgggcaggttgaaggttgggtaacactaactggaggaccgaaccgactaatgttgaaaaattagcggatgacttgtggctgggggtgaaaggccaatcaaaccgggagatagctggttctccccgaaagctatttaggtagcgcctcgtgaactcatctccgggggtagagcactgtttcggcaagggggtcatcccgacttaccaacccgatgcaaactgcgaataccggagaatgttatcacgggagacacacggcgggtgctaacgtccgtcgtgaagagggaaacaacccagaccgccagctaaggtcccaaagtcatggttaagtgggaaacgatgtgggaaggcccagacagccaggatgttggcttagaagcagccatcatttaaagaaagcgtaatagctcactggtcgagtcggcctgcgcggaagatgtaacggggctaaaccatgcaccgaagctgcggcagcgacgcttatgcgttgttgggtaggggagcgttctgtaagcctgtgaaggtgtactgtgaggtatgctggaggtatcagaagtgcgaatgctgacataagtaacgataaagcgggtgaaaagcccgctcgccggaagaccaagggttcctgtccaacgttaatcggggcagggtgagtcgacccctaaggcgaggccgaaaggcgtagtcgatgggaaacaggttaatattcctgtacttggtgttactgcgaaggggggacggagaaggctatgttggccgggcgacggttgtcccggtttaagcgtgtaggctggttttccaggcaaatccggaaaatcaaggctgaggcgtgatgacgaggcactacggtgctgaagcaacaaatgccctgcttccaggaaaagcctctaagcatcaggtaacatcaaatcgtaccccaaaccgacacaggtggtcaggtagagaataccaaggcgcttgagagaactcgggtgaaggaactaggcaaaatggtgccgtaacttcgggagaaggcacgctgatatgtaggtgaagcgacttgctcgtggagctgaaatcagtcgaagataccagctggctgcaactgtttattaaaaacacagcactgtgcaaacacgaaagtggacgtatacggtgtgacgcctgcccggtgccggaaggttaattgatggggttagcgcaagcgaagctcttgatcgaagccccggtaaacggcggccgtaactataacggtcctaaggtagcgaaattccttgtcgggtaagttccgacctgcacgaatggcgtaatgatggccaggctgtctccacccgagactcagtgaaattgaactcgctgtgaagatgcagtgtacccgcggcaagacggaaagaccccgtgaacctttactatagcttgacactgaacattgagccttgatgtgtaggataggtgggaggctttgaagtgtggacgccagtctgcatggagccgaccttgaaataccaccctttaatgtttgatgttctaacgttgacccgtaatccgggttgcggacagtgtctggtgggtagtttgactggggcggtctcctcctaaagagtaacggaggagcacgaaggttggctaatcctggtcggacatcaggaggttagtgcaatggcataagccagcttgactgcgagcgtgacggcgcgagcaggtgcgaaagcaggtcatagtgatccggtggttctgaatggaagggccatcgctcaacggataaaaggtactccggggataacaggctgataccgcccaagagttcatatcgacggcggtgtttggcacctcgatgtcggctcatcacatcctggggctgaagtaggtcccaagggtatggctgttcgccatttaaagtggtacgcgagctgggtttagaacgtcgtgagacagttcggtccctatctgccgtgggcgctggagaactgaggggggctgctcctagtacgagaggaccggagtggacgcatcactggtgttcgggttgtcatgccaatggcactgcccggtagctaaatgcggaagagataagtgctgaaagcatctaagcacgaaacttgccccgagatgagttctccctgactccttgagagtcctgaaggaacgttgaagacgacgacgttgataggccgggtgtgtaagcgcagcgatgcgttgagctaaccggtactaatgaaccgtgaggcttaaccttacaacgccgaagctgttttggcggattgagagaagattttcagcctgatacagattaaatcagaacgcagaagcggtctgataaaacagaatttgcctggcggccgtagcgcggtggtcccacctgaccccatgccgaactcagaagtgaaacgccgtagcgccgatggtagtgtggggtctccccatgcgagagtagggaactgccaggcatcaaattaagcagtaagccggtcataaaaccggtggttgtaaaagaattcggtggagcggtagttcagtcggttagaatacctgcctgtcacgcagggggtcgcgggttcgagtcccgtccgttccgccacttattaagaagcctcgagttaacgctcgaggttttttttcgtctgtatatctattattgccagaatcgcaaaaatcctctgcattttacgctctttttcctcaacagtctgaagcccataatcacctcagttaacgaaaatagcattaaaagaggcatattatggctatccctgcatttggtttaggtactttccgtctgaaagacgacgttgttattagttctgtgataacggcgcttgaacttggttatcgcgcaattgataccgcacaaatctatgataacgaagccgcagtaggtcaggcgattgcagaaagtggcgtgccacgtcatgaactctacatcaccactaaaatctggattgaaaatctcagcaaagacaaattgatcccaagtctgaaagagagcctgcaaaaattgcgtaccgattatgttgatctgacgctaatccactggccgagtccagacgatgaagtctctgttgaagagtttatgcaggcgctgctggaagccaaaaaacaagggctgacgcgtgagatcggtatttccaacttcacgatcccgttgatggaaaaagcgattgctgctgttggtgctgaaaacatcgctactaaccagattgaactctctccttatctgcaaaaccgtaaagtggttgcctgggctaaacagcacggcatccatattacttcctatatgacgctggcgtatggtaaggccctgaaagatgaggttattgctcgtatcgcagctaaacacaatgcgactccggcacaagtgattctggcgtgggctatgggggaaggttacagtgtaattccttcttctactaaacgtaaaaacctggaaagtaatcttaaggcacaaaatttacagcttgatgccgaagataaaaaagcgatcgccgcactggattgcaacgaccgcctggttagcccggaaggtctggctcctgaatgggattaagcctctctgacagctcctccgggagctgtttttacatgctcgctaaggaaatcgataaaagcccggatgcgcgtacttaccgcacggtcgctgtaatagacggcactgaatggcatttccactggcaacactttatctgccattaactccaccaattctccgcgagcgatttctttgtcgatcatgtagtcggacaaacacgcaatcccgttgccactcaggcaaagctgtttcagtgtttccccactattggaactcaaaccgtacttcacctcatgtaattgtccatcgctacgggctatcggccaggtattgagggaagcgggttcagtgaatcccaggcaaatatgttgctttaaatcgtcgatcgtttctggcttcccgtagcgggaaatataatcgggggaggcgataatttttcgataactgttaaataacggcctggcacgtaagctggaatccgttaacgtaccagcgcgtatcgcgacatccacttttctttcgatcaaattaataatcgtttcggaggagactaggctcaaagtgacttccggatagcgttcacggaaaggcttaattaacggcatcagaaagtgcagcaccactggagttgcggcatcgatccgtaacagtccacgcggtgtattacgcgtctccataatttcactttctgccgctgccatctcctgcaaaatactctgtacgcgacgaaaataacgctcgccttcttccgtcaggctaagttgtcgcgtggtccgattaagcaggctaacgccaagtttcatctccagctttttcaccgcccggcttaccgcactgtttgcttgccctaattgttccgctgcccggctaaagctgccgctttcgacgacgctaacaaaaatggcgagttcttcgctcgtggctttcatttttgctcctgttgcaaaatagaagagatattttgaatttatttgtcattaaaccatcaggatgcgtgatatgtcatgcgatttaatgttctccataatgagcaaaattctgaccggtgtaagcacttgcttacataacaatatacaattgctcgttgaaagagtgagctaaaatccctataacagtagaaccctcccgagtgcggaagggttgacgtaatagaggtttcaaagtcaaaagtgcgaaaaaacacctatgccatgcgctatgttgccggacaacctgcggaaaggatcttaccgccggggtcttttgcgagcatcggccaggcattaccacctggggaaccgttaagtaccgaagagcgtattcggatcctggtgtggaacatatacaaacagcaacgcgctgaatggttgagcgtattaaagaactacggcaaagatgcacatctggtgttattgcaggaagcgcagacaacgccagagttagtacagtttgcgaccgctaactatcttgccgccgatcaggtacccgctttcgtgctgccacaacatccttctggcgtaatgacccttagcgcggcacatccagtgtattgctgcccgttacgtgaacgagaacccattttgcgtctggcgaagagcgcactggtgacggtctatccattacctgacacccgcctgttgatggtggttaatatacacgccgtcaacttcagtctgggcgtggatgtctatagtaagcagttacttcctattggcgatcagatagctcaccacagcggcccggtcattatggcgggagatttcaatgcctggagccgtagaaggatgaacgcgttatatcgctttgcgcgggaaatgagcctgcgccaggtgcgttttaccgatgatcagcgccgtcgggcgtttggtcgcccgctcgattttgttttctaccgtggtctgaacgtcagtgaagcttctgtactggttacgcgcgcttccgatcacaatccgctactcgttgaattcagtcccggcaagcctgataaataaggtatgagtggtctgccacagggcagaccaacgtttggcgctgcgcaaaacgtgagcgcggtggtggcgtatgacttatctgcccacatgctggatgtcgtggcacaagctgccgaagcccggcaactgaaaaatatcaccacccgccagggatatgccgaaagtctgccatttgccgataacgcatttgatattgttatcagccgttattctgcccatcactggcatgatgttggtgcagcactgcgagaagtgaataggatattgaaacctggcggtaggctgattgtgatggacgtaatgtctccgggtcacccagtgcgcgacatctggttacagacggtagaagcattacgcgatacctctcacgtacgaaactacgccagcggtgagtggttgacgttaatcaatgaagccaatctgatagttgataatttaattacagataagttaccgctggaattttctagttgggtcgcgagaatgcgtacgccagaagcgttagtagacgctattcgcatttaccaacagagcgcaagcacagaggtgagaacgtattttgccttgcagaatgatggctttttcaccagtgatatcatcatggtagatgcacataaagcggcataaataaaaaaggcaccgggggaatcggtgcctttttattatctggtttgtcaggaatctggcatgttgttgtttttcacaaacaacgtcagcttatcgcctggttgcagattcgcagtgtcgctgttccagcgcatcacatctttgatgttcacgccgtggcgtttagcaatgctactaaggctatcgcctttgcgcacacgatacgtaatgctatcgctgttgtttgccagtcgctgtgcgctactgcctgcaccaatcgtcaaactttggcctggcttcagcttagatccgcgcagtttgttccactgctgcaaatctttggtgcttacgccgagacgactagcgatactactaagcgtgtcgccagagcgtacggtgtaaacacggctgttaagcggcgtattgtcggcaaccagcgtgctctgtacagcagcaatttcgccactagccagagattcacgcagttgatctgcatgcttctttggcaccatcacgtactgcgggccacttgcgcccagcgtggagccttttacgccagcgttgaatgtcttcagcttgctgacggaaatccccgccatatctgctaccttcgccatttcaaccgggctgctcaggtgcacacgcgccagagcacggctttcatcggtcgttggcagacgtacgccataacgcttgctgtttttgagaatatcactcaatgccagcattttaggcacgtactgcttcgtttcctgcggcaacggtaagctccagaagtccgtggatttcccacgcgctttgttcgttttaattgccttcatgacccgaccttcgccgctgttataagccgctacggtcagaagccagtcgccgtcaaacattttgttcagacgctgcatcatattcagcgcggcagttgcactagcaacaacatcgcgacgcgcgtcataattgcgggtctgtttcaaaccataattgcgccccgtgctcggaatgatctgccagatgcctgcggcattggcgccagacgttgcgtgaggatcaaaagcgctctccactatgggtagtagtaccagttccataggcatgttacgttttttaacttgccctgctatccagtacatatacggctctgcccgtaaagttacatcgtggagatagctcttattgcgtaaatatttctgtttctgttcgcgaatccggtcattttccggaattcccatctttagctcgtcgccaatgaaagcccacaagtcaccatctggcgcgatagacgtcccatcgtccatccatcgtgcctgacttgtaaactttgctgcttccccttgaccagctgcagaaaggctctgtgcgtgctgttgaacgttgccggtactctggcaacccacgagcaggacagaggcgagtaatatcgcttttgccttcatgtgtgtgtcaatagttgcttaaaagacgaccgatcataacggcgaacggagccgatgacaagaaagttttatcagaacctatctttcttactccttaaccatgcaaaacgctcttcaggttgttgcaataatgtttcttcattaattacattaattaaatcaatatcttccgttcttaaaaaaacattaatttgccgctcatttttcagaattacgggtagtgttatttgattttttgcccgtaactccttaactttacgataataatcatttatggacaaatcgtgcggaagaatactcaaagcaaacttcatattacttaaggtatattcatgagcacaacataccaatgtatcgtcaggtaacgcacttaactttttaagactttgatacatttgacttgctgtcccttcaaacaaccgaccacacccaccagaaaacagtgtgtcgccgcaaaatagataaggtttactgaagtaacagatatgtcctaaagtgtgacccggcgtagcaattacactaaattcatgccccaaaacgaaggcagtttcgccatctttgactacctgtgttgttcccttatcttgtgtctcttgtggaccatacaccacaatttgtggaaacttttccaccagttcttttacgccgccaacgtgatcgtggtgatggtgggtgagaaatatggcctccggttgccagttattggcggcaatggcgtttaatactggctctgcgtctccgggatcgacaatcaggcagcgacctgcttcatcattcaaaacccagatgtaattgtcatcaaaggcgggaatactgttaagattcatagattacctctcagtgtgaaacggaaggttgtgatgaaaccggcaagagtccctcaaactgtcgtggctcctgattgctggggcgatttgccctggggaaagctttatcgcaaggcgctggagcgccagctcaacccgtggttcactaaaatgtatggttttcatctgcttaagattggcaatttaagcgcagaaatcaattgcgaagcgtgcgcggtttctcatcaagtgaatgtttctgcgcaaggaatgcccgtccaggtacaggcggacccacttcatcttccttttgccgataaatccgttgatgtttgtctactggcacatacattgccgtggtgcaccgatccgcatcgtttattgcgtgaagccgatcgggtattgattgatgatggctggctggtcattagtggcttcaatcccatcagttttatgggattacgcaaacttgtgccggtattgcgcaaaaccagcccctataacagccggatgtttactctgatgcggcagctggactggctctctttgttgaattttgaagtgctacacgccagccgtttccacgttctcccgtggaacaaacacggaggaaaactattgaatgcgcatattcctgcgcttggttgcttacaacttattgttgcccggaaacggactattcctttaacgctaaatccgatgaaacagagtaaaaacaagccacgaattcgccaggcggttggagccacccggcaatgtcgtaaaccacaggcttaaacttcaacttggtagcctgtatcttccagtgtgggattcatcgccgcggcacgagccagttcatcacagcgttcgttttccgggtgtccggcatggcctttaacccattcccatttgatttgatgctgccccaatgcagcatcaagacgttgccagagatcgacattttttactggttttttgtctgcggttttccagccacgttttttccagttatggatccactgggtgataccctggcggacatactggctgtcggtactcaaaatgacttcgcaatgttcttttaacgcctccagcgcgacaatagcggccatcaactccatacggttgttggtggtgcgggtgtagccagcgctaaaggttttctcgcgtccgcgatagcgtaaaatagcgccgtaacccccaggtcctggattgcccagacagctaccatcggtgaaaatttctacctgtttaagcatctctggtagacttcctgtaattgaatcgaactgtaaaacgacaagtctgacataaatgaccgctatgagcactgcaattacacgccagatcgttctcgataccgaaaccaccggtatgaaccagattggtgcgcactatgaaggccacaagatcattgagattggtgccgttgaagtggtgaaccgtcgcctgacgggcaataacttccatgtttatctcaaacccgatcggctggtggatccggaagcctttggcgtacatggtattgccgatgaatttttgctcgataagcccacgtttgccgaagtagccgatgagttcatggactatattcgcggcgcggagttggtgatccataacgcagcgttcgatatcggctttatggactacgagtttagcttgcttaagcgcgatattccgaagaccaatactttctgtaaggtcaccgatagccttgcggtggcgaggaaaatgtttcccggtaagcgcaacagcctcgatgcgttatgtgctcgctacgaaatagataacagtaaacgaacgctgcacggggcattactcgatgcccagatccttgcggaagtttatctggcgatgaccggtggtcaaacgagcatggcttttgcgatggaaggagagacacaacagcaacaaggtgaagcaacaattcagcgcattgtacgtcaggcaagtaagttacgcgttgtttttgcgacagatgaagagattgcagctcatgaagcccgtctcgatctggtgcagaagaaaggcggaagttgcctctggcgagcataaatacctgtgaaaggcgctaaaaatagcgacttgggcgatttttgcagcaaacgattcaaaagatgagaaaaaccgttgacgaaggtcgaggcaatccgtaatattcgcctcgttcccaacggaacacaacgcggagcggtagttcagtcggttagaatacctgcctgtcacgcagggggtcgcgggttcgagtcccgtccgttccgccactattcactcatgaaaatgagttcagagagccgcaagatttttaattttgcggtttttttgtatttgaattccaccatttctctgttcaatgattttactctggcgtaggtgcgtgattctcgcttgttgtctcattcattaaaattcaataatgatatcgaaccattcagcttaaatatatttctagagaataaatttatattgattaaatgaatgtatatttcaaattgattttgtttgttattatttaagtgaggtatataattagagtccgttatcaatgctaaatattctaatcattatgacaggcgagggagtgtccaattatgaatagtaaaaagctttgttgcatatgtgtgttattcagcctgcttgcaggatgtgcctctgaatcttctattgatgaaaagaagaaaaaagctcaagtcacacaaagtaatattaataaaaacactccccagcaactgacagacaaagatttattcggtaatgaaaccactctggccgtatccgaagaggatattcaagctgcgcttgatggagatgagttccgcgttccccttaattctcctgtaatacttgttcaatccggcaaccgcgcaccggaaaccattatgcaggaggagatgcgaaaatattatactgtttccacattctctggtatcccggacaggcaaaagcctctgacttgtaacaaaaacaaagataaaaatgagaacgaggatgttgccagtgctgagaatatgaactggatgcaggcactgcgttttgtggctgcaaaaggacatcagaaagcgattattgtttaccaggatatgttgcagacaggaaaatatgactctgcgctgaaaagtacagtatggtccgactataaaaatgacaaactcactgacgctatctccctgcgctacctggtacgtttcacgctggtggatgtggcaacaggtgagtgggctacctggagcccggtgaattatgaatataaagtgcttccaccattgcccgacaagaatgaagccagtacgactgatatgacagagcagcaaatcatgcaacttaagcaaaagacctataaagcgatggtaaaagatttggttaaccgctatcaataataaattatatctgccgccaggaatttctggcggcaataatacaaaattctttgcataagaaatttttcttgacaaagacagtgcaagaaaggacatggaatccggagttaaaaactgtttgttttagaatatttaattatttaactgctgaatcttccttgcgagaaatatatccattattacatttcatgccatttttaatatagattgctcctgggaaaattcccgtattattaccgcaggggtgataattagtattgacatatcctgtgacaaaaggagctattaaaggtgctattacgatagctattagtaaaaatataagagttagctgtattgttatgtctgtggcgaaattgactaccttcgtttttttgattaagaatgattttattatcgtaagtaaaattacatgaatatttaaaaaggaaaacgacatgaaaccgaagcacagaatcaacattctccaatcataaaatatttccgtggagcattttattattgaatatagaggtttaactccggtaaaaaacaaagaagcattgaatgcagggaaaaataatatggccataaaaaacatcgaaagaaactcttttaatttaacatgtaaacgcatggttaatcctcatatcacgggtggagtgttaagaacatacataaatggagtcatgttttcccttttccatttatcaagttcctgttgccgttttagtccatctctaattgcatattttaatttttcacttaaatggcattgagcatcgatttcatttaaaacaactgtacacactatccctgtcagtaaaattgctcctccgacaagaattactggaaagccaaagctaacacaggcaaaagaagccagacttccaatagcggttgcaacaccaccggctataactgctttggccacatccatactaaaatcgccaagaaaattaaccagatctcgctcactactcataataaattctatggttctgctgatttaaccgcagagaagttcgccacagcaatccgaaaccactggcacgtggagaataagctgcacaggcgtctggacgtggtaatgaatgaagacgactacaaaataagaagaggaaacgcagcagaattatttagtgggatacggcacattgctattaatattttgacgaatgagaaggtattcaaggcagggttaagacgtaagatgcgaaaagcagccatggacagaaactacctggcgagtgtccttgcggggagcgggcttagctaataataccccgactctccccgtccttaaacacaacccccactcaccacaacctaaactcatccgcatcctgccatgccggaaacttttctctatattcccgcaatgctgccatgctcagctccgcatcaatgcgcgttgcctgatgcgcgtcggcagtagcgataatctctccttgcggattaatcacccggctgtcaccgcgataatggcagccgttgccatcgctgccgacgcgattgcatcccgccacatacgcctgattctcaatcgcgcgggccgtcagcaatgcctgccagtgcagagagcgcggagcaggccagttggcgacgtacagggcgaggtcataatcgttgagattgcggctccacacaggaaaacgtaagtcgtagcacaccagcggcaaaatacgccagccgcgccattccacaatcactcgcgcattgcccgctttataatgtagatgctcatctgccatgcggaacagatgacgcttatcataaaaatgtaccgtgccgcccggctcaaccagcaaaaagcggttaacgctaccagactccgtttgtaatgcaacactgcctgcaatcagcgcattgcactgctgcgccttagctgtcatccagttcactacgtcatcttgtgctaggctgctagctgccgcttccatggcaaagccgctggtaaacatctccggtagaacgatcacatcgcgcccggtaataccttccagttgacgatcaaaatgacgcaggttggcaggaccatccatccacaccagtggttgctgcaaaagcgtaatcttcaaaccaggcacggtgtacaactcctttatgcgaagggttttataactttaacaccttatcaggcagttgccttagcgcagaataaattgataacaaatgctgatattggaaatatctgatttgcaaattatcgtgttatcgccaggctttaggaggttaataacatgggcaggataagcagcggaggaatgatgtttaaggcaataacgacagtcgccgctctggtcatcgccaccagtgcaatggcgcaggatgatttaaccattagcagccttgcaaagggcgaaaccaccaaagctgcatttaatcagatggtacaagggcataagctgcctgcctgggtgatgaaaggcggtacttatactcccgcacaaaccgtaacgttgggagatgagacgtatcaggtgatgagcgcgtgcaaaccgcatgactgtggcagccaacgtatcgctgtgatgtggtccgagaaatctaatcagatgacggggctgttcagcactattgatgagaaaacgagccaagagaaactcacctggctgaatgtgaacgatgcgcttagcattgatggtaaaacggtgttgttcgcggcgttgaccggcagcctggaaaaccatccggatggctttaattttaaataattagcggataaagaaacggagcctttcggctccgttattcatttacgcggcttcaactttccgcactttctccggcaactttaccggcttcgtcgccagctcttccggatcaaagtcatcaacgttaatactgcgcagacggctttcttcagctttcaccagaatagcggcttcatctttatcaatcagccccttcaccagcgcgttgtgcgccagttcatccagacgggtaaacggcaggtttttacccagctctttacagatccgctgatgaattgggtcggcggcaatcacatccaccagcgcctcttccagcaagccaaccggattatgctcgctcggcgtcaggtactgaccgcgaccaatgcgggaacgggtggcgttcggcacttgtaaaatcttcgccactttatgatccagcttgtcagaaggtgccagataatgacgtccggtcgggaagatcaccacattcagcagcccggcaaccacgcggttcgggaagttttgcagtaaatcatccatcgcctgttcagcctgatacagcgcatcttgtacgccccagtgcaccagcggcaggtcggcttcattacggccttcgtcgtcataacgcttcagcacggcagaggcgaggtagagctggcttaaaatatcccccagacgggcgctgatgcgctcgcgacgtttcaggctgccgcccagcactgccatgctgacatcagaaagcagggcgaggttggcgctcaggcggttcaggtgctgatagtagcgtttagtggcatcgccggttggcgtgctgctggttaaaccgcgcgtcaggcccagccagaagctgcgaactttgttgctaccgacgtgaccgatatgtttgaacaacagtttatcgaacgcgttgacgtcattgttcttcgccgcttccatctcttccagcacgtacggatggcaacgaatcgctccttgtccgaagatcatcatgctgcgggtcagaatgttagccccttcaacggtgatggcaatcggtgcgccctggtaagcacgcgccaggaagttgctttgcccgagcataatgcctttaccgccggtaatatccatcgcatcaataatgttctgctgcccgcggtgggtacagtgatacttaacgatagcgctcagcacggcaggtttttcgccgagcataatgccgtaggtaatcaggcttgccgcagcatccatcacgtaggcattaccggcaatacgcgccagcggctcttcaatcccttccatcttaccaatagagattttgaactgacggcgaatgtgagcatacgcgccggttgccagcgctacgcttttcacgccgccggtactgttggaaggcagggtgatgccgcggcctacgctgaggcactccaccagcatccgccagccttgcccggccattttcggcccgccgatgatgtaatcgatcggcacgaagacatctttaccgcgcgtcggtccgttctggaacggtacgttcagcgggaagtggcgacgaccaatttccacgcccggcgtggtggttgggatcagcgcacaggtaatgcctaaatcttctgcaccgccgagtaatttttccgggtcggagagtttaaacgccagcccaagcacggtcgcaatcggtgccagcgtaatgtagcgtttgttccaggtcagacgcatccccagcacctgctggccctgccattcgcccatgcagacaatcccggtgtccggaatcgcgcccgcatcggaacccgcttccgggctggtcagtgcaaagcaggggatctcctgaccacgcgccagacgcggcagatagtgatctttctgctcgtcagtgccgtaatgttgcaacagttcgcccgggcctaaactgtttggcacgccgacggtaatcgccaggatcccgctcacgccggagagtttttgcagcacgcgagactgggcataagcgctgaactccagcccgccgtactcttttttgatgatcatcgcgaagaaacgatgctctttaaggtacgcccacaactccggcggcagatccgccagctcatgggtgatctggaaatcattcgccatccggcaggcttcttctaccgggccgtcgagaaacgcttgctcttcggcggtcaggcgcggctgcggatagttatgcagctttttccagtccggcttgccctggaacaagtcgccctcccaccaggtggtgcccgcatcaatcgcttctttctcagtgcggctcatcggcggcatcaccttacggaaaccgcgaaataccggcgcggaaatcatgctcttacgcataggcgcaaagttaaatggcacgaggataatggccagaggcaccagtacccacgcgctccacagaccagcaacgccgagggcggctgtccaggcgagcaaaatcagactgctgataaataagctcacgcggtgatagaacaacgcgccgagcaggacaaccgtagcgagaatactcaaaatcatcataacgaaaagccccttacttgtaggaggtctgaccacttgtgatgatatggttgtagtggatgtaaaaacatttagcaatatgtttacaatataattacaacaaagctcacattgttgctgtttttatccgcacttcaggtcaaaaagtcctggtcatagcacctgcccgtacttctcgcttttggcggtatccggtacactgcattttgtctattacatttatgctgaaggatatcctcatgtaccaggatcttattcgtaacgaactgaacgaagcggcggaaacgctggctaactttttaaaagatgacgccaatattcacgccattcagcgcgcggcggtcctgttagcagacagctttaaagccggtggcaaagtgctttcctgcggcaacggcggttcccattgcgacgctatgcactttgccgaagagttgaccggtcgctaccgtgaaaaccgtccgggctacccggcgattgctatttctgacgttagtcatatttcctgcgtcggtaatgatttcggtttcaatgatattttctcccgctacgttgaagcggtaggtcgcgaaggcgatgtactgctggggatctccacctccggtaactctgcaaacgtgatcaaagcgatcgcagcggcgcgtgagaagggaatgaaagtgatcaccctgaccggtaaagacggcggcaaaatggctggcacggcggatatcgaaattcgcgtaccgcactttggttatgccgaccgcattcaggagattcacattaaagtgatccatatcctgatccagttgattgaaaaagagatggttaagtaagtctggcgtaggccggataagacgtttacgccgcatccggcatttgtgcgctgatgcctgatgcgacgctgacgcgtcttatcatgcctacaaatctgtacgcgaaccgtaggccgaataatgcgttcacgccgcatccgacctgaaaattcttaaatcaatcttcgccgggggccatgcgctcccgctgttgtggaggttacccatgtgcgaattgctcgggatgagcgccaacgtccctaccgatatctgctttagtttcaccgggcttgtacagcgtggtggtggaaccgggccacataaagatggctggggcattaccttttacgaaggtaaaggctgtcgcacatttaaagatccacaacccagctttaattcccccatcgccaaacttgtccaggactacccgataaaatcctgtagcgtggtggctcatattcgccaggctaatcggggcgaggtggcgctggaaaatactcacccatttacccgcgagttatgggggcgtaactggacttatgcccataacggacaactgacgggctacaaaagtctggaaaccggcaacttccgcccggtaggcgaaaccgacagcgaaaaagccttctgctggctcctgcataaattaacgcagcgttacccgcgcacaccgggcaacatggcggcggtatttaaatatatcgccagtctggcggatgaactgcggcagaagggcgttttcaacatgctgcttagcgacgggcgctatgtaatggcgtattgcagcactaatttacactggatcacccgccgcgcgccgtttggcgtggcaacgttgctggatcaggatgtggaaatcgacttcagcagccagaccacaccgaatgatgtggtcacggtgattgcaacacagccgctgacgggcaatgaaacctggcaaaagattatgccaggcgaatggcgcttattttgcctcggggagcgtgtagtttgattattttgcctcggggagcgtgtagttacttgccagttgtggctgcacaacttcgtggcttaacggcttgctgaccacgtaacgaccattgaccacagaaacggttggtggcttacgggtttgctcaaagtagtcgtaacccggcttcagttgctcccagaagtccttaaagttggaatatttatggcgcttcatattggcgtcggtcatgcggaacgggtaaatactcacttgcacgctcggctgaccaaacaccagcgcaccagtaacgaactggaatatctcatcaataccctgattggtcattgcgtagcagccgatggaaacacaatcgccgtggatcatcaggtatttcccttcataaccatgcgcacggtcataggcattggggaaaccaatattaatcgctttgtagtaacggctgtctggttttaactgattacgctggacgctataaaacccttccgggcttttgaaatcgccctgacgctgttttggccctaagccgccggaatatttacagattttatagctgtcgagcagttgatattgctcgcccattttgacgtagagatcgagcgtacgttcttccttgaagatctggatgtagacaggggatcccatcaactgctgcttatactctttgctcacaggcgtggtagagctactgctgcccagcaaaccggcaaaactaacgcacgggatcaacaacatcgcaagaattaatgcgattttacgcatactgcttattccttgataaaacggttacacacgccaggacggcaaaatggatcccaaatcggaatagtctggatttggaaggctcacattatcaccaaaagagttttacgcaagcctgtcggcgcagggtttacaaatttcatcggaagcgggctttacccaaagagcgccgcgtgagttccagttctctcaaatcgtaaaagtttatcggtaagtttgtaaatcaggatccagtccggttcgacatgagcatcgcgataacctttccaactaccttgcagcgggtggtctttataaacagctggaagcggtaaagtattattgataagaagcgtcataagatatttcaatttattcatatccttatgacgcttttgtgcaagttttacatccttactatattgtccgctgtattcaatatccctttgaatcatatttaaattcctaatttatcaaataaatcatcggcgtctttggccttatgaacatcaatgccagcttcgctgtttttgatactttgaatggttaattgattaggctcgcgtaaatcaaacggcaatgccttttcacgcgcgacctttgtgagggttatgcgaaccaggtcagagatggtcagccccatcccggccagtacgtccgctgcctgattcttcagatcttcatcgattcgggcgcgaacaaacgcgttagcagccattggggtatctcctgtgctgtatatttattcagcttgaattgtagctcaaatgagcaacagcgacaatccatgagtaatttaataaacggatgtttttacataattaactgaaatatatatgttaattttataataatggtttattaagtttgttcagaaacgatccgggatacactgcaacattaaagcatgaccagccattattgagtatgtccttgccgagcattccatcctttgtattgagcggattactgttgatttgtttgccgttttctagttttgccagcgccaccacaagtcatatctctttcagctacgccgcccgccagcggatgcaaaaccgtgcgcgtttattaaaacagtaccaaactcatctgaaaaagcaggccagctatattgtggaaggcaatgccgaaagcaaaagggcgctacgccagcacaaccgggagcagataaaacagcatccagaatggtttcctgctccgctcaaggcgagtgacagacgctggcaggcgctggcggaaaacaaccactttttaagcagcgaccatctgcataacattaccgaagtggcgattcaccgcctggagcagcagcttggcaagccttacgtctggggcggtacgcggcctgataaaggctttgactgtagcgggttggttttttatgcctacaacaagatccttgaggctaagctcccgcgcacggccaatgagatgtaccactatcgccgggcaacgattgtggcgaacaacgacctgcgccggggagatttgctgtttttccatatccacagccgcgagatagccgatcatatgggcgtgtatttgggcgatgggcaatttatcgagagcccacgtaccggcgaaaccattcggataagccgattagccgaacctttctggcaggaccattttttgggcgcgcgcaggattttgacggaagagacgattttgtaagacggataaggcgtttacgccgcatccggcagttgtacgcaggtgcctgatgcgacgctggcgcgtcttatcatgcctacgagcccgcgaatatttgcgagccgctttcccgatataaaacaacctcattgccaacctttccttttcttcttaccgttgagaaaaaggagtcgccatgtctgaatatcgtcgttattacatcaaggggggaacatggtttttcacggtgaatttacgaaatcgtcgaagccaacttttgaccacccagtaccagatgctccgtcacgccattattaaagttaagcgagacaggccttttgaaatcaacgcctgggtcgttttgccagagcatatgcactgtatctggacattacctgaaggcgatgatgatttttccagccgctggcgggaaattaaaaagcaatttacccatgcttgtggattgaaaaatatctggcaaccacgtttttgggagcacgccatccgcaataccaaagattataggcatcatgttgattatatttatataaatccagtaaagcatggttgggtaaagcaagtgagtgattggccattcagtacgttccatcgcgatgtcgcgcgagggttatatcccatcgattgggcgggggacgtaacggattttagtgccggggagcgtatcattagttaattgtgcgcagatgcctgatgcgacgctagcgcgtcttatcatgcctacaaacttgtgccggatcggtaggccggataaggcgtttatgccgcatccggcagttatgcgcagatgcctgatgcgacgctggcgcgtcttatcatgcctacaaacttgtgcctgaacggtaggacggataaggcgttcacgccgcatccggcagttgtgcaccaatgctggatacttacatcaacgcccccataatcttcaactccagctcatccggcacttcgttatacgacagcacatgcagccccggcgcaaacaaccttgcataacgcgccagcaaagggcgcagctgcggtggcaccagcagcaccgggtctttccccgccgctttcatctgctctttcacctgtggcatcgtactctggaactggttgagcatattcggatcgaccggcacgctgtcgagcatcactttcccgccctgttgcgcctgattcaccacgttggtcagcagattttccagctcattattcagcgtatacaccgtcagctcctgcttgcgaacgaacggatgggtaatgctgcgccgcaatgccaggcgcacatcggccgccagcagaatatgatctttcgtcaccgtgctactggcgaccagcacggtggcgatggtgacgatatcgcgcagggaaacgccttcggtcagcagcgcccggtacactttcagcaactggctgtaattgagcgccgcgctcaaatcttccgccagacgcggtgccgtcgacgataaacggttatgcaactgcgtaatatcatcatagttaaacaaatcaggaatatagctgcgcacaatcttatttacatgggtagcgatcacgctggcgctgtcgatcacctgataccccatattcagcgccttcgctttctgcgccgcctggatccaggtgaccggcatcccgtacgccgggtcgttcccctgcacgccgtcaatctcgccgtaggtttcgctggagggcagggccatcagtttatccgccggaatatccgcttcatcagcctttatgccgttgatgaaaatggcgtactgactgggcttaaggcggaagttttcccgaatgcggatctccggcagcagcacgccgttgccgtcagaaatcacctgccgcacgccgcgaatccgctgggtgagcgggttaccctgtgctttgtccaccagcgccaccagtttgtaaccgaggcttaaactgataggctcgatcagcggaatggtttcccaactgacctgctgctcgctggtttcggtgatggtgcgggtcagcgtttcgaggcttttctcttccgcctccgccgccagcggctgtttgctcatccgccagccggtaaaaccaagcagggcgctgaacagcaaaaacggcaggtgcggcattcccggtaccaccgccagcacgaacataatcccggtggcggtgtagagcaccgacgggcttgccagcagctggttacgcacgtcatgggcgatatcgccgttgtcgctgacgcgggtgacgataatcgccgccgcggtggagagcagcagggaagggatctgcgccaccaggccgtcgccgatggtcatcagcacatactgctggaaggcagcatcggcgctcaggttgtatttgaagatcccgatacagacgccgccgatcaggttgatcgccagaatcatcatcccggcgatggcgtccccgcgcacaaacttcgatgccccgtccatcgcgccgtagaaatcggcctcgctggcaacatctttacgccgggtttgcgcctgcgcctggttgatcaatccggcgttaagatcggcgtcaatcgccatctgtttgccgggcatcgcgtctaaggtaaagcgggcagaaacctcggaaatacgctcggcccctttggtgacgacaataaagttgattgtcaacagcgtcagtaaatccgagcgtgaaagcattatcgccgcgctgcacgggcagtcgatttttaacggtggtgggctgtcgccgttaaataaaatcagcccgtctcatccgccaaaacctgccaccgtggcggtgccggaagagacggagaaaaaagcgcgtgatgtgaatgagaaaacggcgctgctgaagaagaaatccgccaccgagcttggtgagctggcaaccagtatcaacaccattgcccgtgatgcgcatatggaagcgaatctggagatggagattgttccccagggattacgcgtgctgattaaagacgaccagaaccgcgatatgtttgaacgcggcagcgcgaagattatgccgttctttaaaacgctgctggtggagctcgcgccagtgttcgactcgctcgataataaaattattattaccgggcataccgatgcgatggcctacaaaaacaatatctacaacaactggaacctttcgggtgaccgcgcgctttcggctcgtcgggtgctggaagaggccggaatgccggaagataaagtgatgcaggtaagcgcaatggcggaccagatgctgctggattccaaaaatccgcaaagcgcgggcaaccggcgcattgagattatggtgctgaccaaaagtgcgtccgatacgctgtatcaatactttggtcagcatggggataaagtggtgcagccgctggtgcaaaagctggataagcagcaggtgctttcgcagcgaacgcgttaaatgctgaatctttacgcatttctcaaaccctgaaatcactgtatactttaccagtgttgagaggtgagcaatgcgtaaaatcattcatgtggatatggactgctttttcgccgcagtggagatgcgcgacaatcccgccctgcgcgatatccctattgctattggcggcagccgcgaacgtcggggggtgatcagcaccgccaattatcccgcgcgtaaatttggcgtacgtagcgctatgccgacagggatggcgctcaaattatgcccacatctcaccttgcttccggggcgctttgacgcctacaaagaagccagtaatcatatccgtgaaatcttcagccgctacaccagccgcattgaaccgttgagtctggatgaggcttatctcgatgtcaccgatagcgtccattgccacggttctgcgaccctcatcgcccaggaaatccgccagacaatcttcaacgagctgcaactgacggcgtctgcgggcgtggcaccagtaaagtttctcgccaaaatcgcctccgacatgaataaacccaacggccagtttgtgattacgccggcagaagttccggcatttttacaaaccttaccgctggcaaaaatccccggcgtcggcaaagtcagtgcggcaaaactggaagcgatggggctgcggacctgcggtgatgtacaaaagtgtgatctggtgatgctgcttaaacgctttggcaaatttggccgcattttgtgggagcgtagtcaggggattgacgaacgcgatgttaacagcgaacggttgcgaaaatccgtcggcgtggaacgcacgatggcggaagatattcatcactggtctgaatgtgaagcgattatcgagcggctgtatccggaacttgaacgccgtctggcaaaggtaaaacctgatttactgattgctcgccagggggtgaaattaaagttcgacgattttcagcaaaccacccaggagcacgtctggccgcggctgaataaagctgatctaatcgccaccgcgcgtaaaacctgggatgaacgccgcggcgggcgcggtgtgcgtctggtggggctgcatgtgacgttgcttgacccgcaaatggaaagacaactggtgctgggattatgatgtatactattatgtatattctggtgtgcattattatgagggtatcactgtatgcatcgaattctcgctgaaaaaagcgtcaatatcactgagttacgtaaaaacccagctaaatactttattgatcaaccggttgcggttctttctaataatcgccccgcaggatatctcttaagtgccagcgcattcgaagcgttaatggacatgcttgctgaacaagaggagaaaaagcccataaaggcgcgcttccgtccaagtgctgcaagattagaggaaattacacgccgcgctgaacaatatcttaatgatatgacggatgatgatttcaatgactttaaggaataaggatgcgggtattcaaaacaaaacttattcgcctgcaacttacagcagaggaacttgatgcgttaacggcggattttatttcctataagcgtgacggtgttttgccagatatatttggtcgcgatgcactctacgacgactcctttacctggccattaatcaaatttgagcgagttgctcatattcatctggcaaatgagaataatccatttccgccacagttgcgccaattcagcagaacgaatgacgaagcgcatttggtatattgtcagggggcgtttgatgagcaagcatggttgctcattgccattctgaaacctgaacctcataaactggctcgagataacaaccaaatgcataaaattgggaaaatggcagaagcgtttcgcatgcgtttttgaatttatattatgaataacatacaaataagaaactatcagcctggcgattttcagcaactatgcgctattttcattagagcggttacgatgaccgccagtcagcattatagtccacaacaaatttccgcctgggcgcagattgacgaatctcgctggaaggagaaactcgcgaaaagtcaagtgtgggttgcgatcattaatgcacaaccggttggttttatttcccgcattgaacattatatcgatatgttatttgttgaccctgaatacacccgccgtggggttgccagcgctttgttaaaacctttgattaagtctgaatccgaacttacggtggacgcaagcataaccgcaaaacccttttttgaacgttatggttttcagacagttaagcagcagcgcgttgaatgccggggagcgtggtttactaatttttatatgcgatataaaccgcaacattaaatccagcttgcaatgaaaataacgcccgcctggtatgtgcgcgttttctgattccacaaactgcaaggaggtaaatcatgacaaatcctttatcaatgactctttgcagacctttccaggattaattctttttttcttgccctggattcgtctgccatttcctgatttttatatttatatactctaaataattcgagttgcaggaaggcgacaagcgagtgaatcgccaggagcttacataagtaagtgactggggtgaacgaacgcagtcgcagtacatgcaacttgaagtatgacgagtataaatggaatggtacatgggcaaatatattcgtcccttatccgatgcggtatttaccatcgcatctgatgacctgtggatcgagagtttagcgatccaacaattacacaccacggcaaatttacccaacatgcagcgcgtagtggggatgccagatttacaccccggacgcggctacccgattggcgcagcgttcttctctgttggtcgtttttacccggcaagacgtcgcggtaacggtgctggaaacagaaacgggccgctactctgacacactgcgtagcgcgctggtttctctcgatggcgataacgcatgggcattaagcgaaagctggtgtggcactattcagtggatttgtccgagtccgtatcggcctcatcatgggcgcaaaaactggtttctgggcattgggcgttttaccgctgatgagcaggaacaaagcgatgcaatccgttatgagacgctgcgtagcagcgggccgggcggtcaacatgtcaataaaaccgacagcgcggtacgcgccacgcatttggcatccggtattagcgtgaaggttcagagtgagcgtagtcagcatgctaacaagcggctggcacgattgctgattgcctggaagctggagcaacagcaacaggaaaatagcgcggcgctgaaaagccagcggcgaatgttccatcaccagattgaacgtggcaacccgcgacggacatttacagggatggcttttatcgaaggataatgaaggatgaaactgccggaaggcgattaaacgccatccggcagcaaatcaaataattacttcgccggaatttctttcagcagttcagtcagcagtgtccagtaatgacctacgctttcgatgtgaacttgctcatccggagagtgtggaccggtgatagttggcccgatagaaaccatgtccatttccggatacggttttttgaacagaccacattccaggcccgcgtggataatctggatgttcggcgtcttgttgaacaggcgctgataggtttcacgtaccagatgcatcaccggagaattagcgtccggctgccagccaggatatgcgcctttcgcttcggttttcgcgccagccagtttacccaggctatccagcatgctcaccacgtagtctttaccgctgtcgatcagactacggatcaggcagtgaatttctacgttattgtcagtcatggtcaccacaccgacgttcagggaggtttcaaccacacctttggctacatcggagttacgaatcacaccgttcggggtggcgttcagcagacgaataaaggtatcgcgagatttcgcaatcagggcagctttatcgttcgctacagagtccagcaacaaggccagatttttctctttttctgccagctcgtttttcaggatctcctgataggtattcaccagagatttcaggacgtcgactttatcagctgcgacagcaatggtcgcaaaggcttcacgcgggatggcgttacgcagtgtgccgccgttgaaatcgataaggcgcagatccagttcttccgcatgacccgccaggaagcgcaccagcagtttgttggcattacccagcccaacgtggatttccccgccggagtgaccgcctttcagaccttttaaggttaacttgaaggtttcaaaaccagctggaaccgcttcacgatctaaatgcaggttggaggtgaagtcgataccccccgcacaacccatgtagatttcaccttcttcttcggagtcggtgttaatcagaatatcagcctgcaaccagttgccctgtaagccgaacgcaccgtccataccggcttcttcggtcatggtcagcagcacttccagcgggccgtgaaccacgttttcgtcagccagaaccgccagcgcagaggccataccaatgccgttatccgcacccagcgtggtgccgcgcgctttaacccattcgccatcaatataaggctggataggatctttcgtgaagtcatgcacggtgtcgttatttttctgcggcaccatatcgaggtgggcctgtaagacgaccggtttacgattttccatacctgcggtagcaggtttacgaatcaggatattacctacctgatcgcgttcgacatggaaacctttctcttttgcccaaccaacaatgtattcagcgagttgctcttcatgataggacgggtgaggaatagaacagattttggcaaaaatatcccacagcggctgtggagataattgagacagttcagacacgttaagtctccttgtcgatcacccgcaaaacagtattgcaggtcacagggttagcagaaaatgttgtcaacacaagacaggcttgcgagatatgtttgagaataccactttatcccgcgtcagggagaggcagtgcgtaaaaagacgcggactcatgtgaaatactggtttttagtgcgccagatctctataatctcgcgcaacctattttcccctcgaacactttttaagccgtagataaacaggctgggacacttcacatgagcgaaaaatacatcgtcacctgggacatgttgcagatccatgcacgtaaactcgcaagccgactgatgccttctgaacaatggaaaggcattattgccgtaagccgtggcggtctggtaccgggtgcgttactggcgcgtgaactgggtattcgtcatgtcgataccgtttgtatttccagctacgatcacgacaaccagcgcgagcttaaagtgctgaaacgcgcagaaggcgatggcgaaggcttcatcgttattgatgacctggtggataccggtggtactgcggttgcgattcgtgaaatgtatccaaaagcgcactttgtcaccatcttcgcaaaaccggctggtcgtccgctggttgatgactatgttgttgatatcccgcaagatacctggattgaacagccgtgggatatgggcgtcgtattcgtcccgccaatctccggtcgctaatcttttcaacgcctggcactgccgggcgttgttctttttaacttcaggcgggttacaatagtttccagtaagtattctggaggctgcatccatgacacaggcaaacctgagcgaaaccctgttcaaaccccgctttaaacatcctgaaaccagcacgctagtccgccgctttaatcacggcgcacaaccgcctgtgcagagcgcccttgatggtaaaaccatccctcactggtatcgcatgattaaccgtctgatgtggatctggcgcggcattgacccacgcgaaatcctcgacgtccaggcacgtattgtgatgagcgatgccgaacgtaccgacgatgatttatacgatacggtgattggctaccgtggcggcaactggatttatgagtgggccacccaggcgatggtgtggcaacaaaaagcctgtgcggaagacgatccgcaactcagtggtcgtcactggctgcatgcggctacgttgtacaacattgccgcctatcctcatctgaaaggagatgacctggccgagcaagcgcaggctttgagtaaccgcgcctatgaagaggccgctcagcgtctaccgggcacgatgcggcagatggagtttaccgtacccggcggtgcgcccatcaccggctttttgcatatgccgaaaggcgatggcccgttcccgacggtattaatgtgtggtggtctggatgcgatgcagacggactattacagcctgtatgaacgttattttgcgccgcgcggcattgcgatgctgactattgatatgccgagcgtgggcttttctagtaaatggaagctcacccaggactccagcctgttgcatcagcacgtcttaaaggcgctgcctaacgtaccgtgggtggatcacactcgcgtcgcggcctttggtttccgtttcggcgctaacgttgccgtgcgtctggcataccttgaaagcccgcgtctgaaagcggttgcctgtcttggtccggtagttcataccctgttgagtgattttaagtgccagcaacaggtgccggaaatgtatcttgacgttctggccagtcgtttggggatgcatgatgcttccgatgaagcgttgcgcgtggagctgaatcgctatagtttaaaagtgcaaggattgctgggacgtcgctgcccaacgccaatgttaagtggctactggaagaacgatccgttcagcccggaagaggacagtcgcttaatcaccagtagttctgctgacggtaaattattagagatcccatttaacccggtgtatcggaattttgacaaaggtcttcaggaaatcaccgactggatcgaaaaacgcttgtgttaaaaatttgctaaattttgccaatctggtaaaacagttgcatcacaacaggagatagcaatgacgttaccgagtggacacccgaagagcagattgatcaaaaaatttaccgcactaggcccgtatattcgtgaaggtaagtgcaaagataatcgattctttttcgattgtctggctgtatgcgtcaacgtgaaaccggcaccggaagtgcgtgaattctggggctggtggatggagctggaagcgcaggaatcccgttttacctacagttaccagtttggtctgttcgataaagcaggcgactggaagagtgttccggtaaaagacactgaagtggttgaacgactggagcacaccctgcgtgagtttcacgagaagctgcgtgaactgctgacgacgctgaatctgaagctggaaccggcggatgattttcgtgacgagccggtgaagttaacggcgtgagtgaaatgtgccggatgcatcacatccggcaatattcattaaaactgatacgtcatgccaaccgcgacaatatcatcattattaatattcaatttgttatcgctatccagttggttgattttataatcaacaaacgcactcatatttttgttgaaataatacgtagcaccgacgtcgatataattgaccagatcttcatcaccgataccttcaatatctttccctttgcttaagacataacccaggcttggacgcagaccaaagtcaaactggtattgagcgaccgcttcaaagttctgtgtcttattggcaaagccgccagttattggcgtcattttgcgtgtttcagaatagaaagttgccagataaatattattggcatcgtatttcagacctgttgcccatgcttctgcacgcttgcctgtgccacggctttgcaggttctgctcgttggtgcgatcactgttggtataggccccactaatggcgaaatcgctgccgccaaagtcatatgtcaaactcgtgccgaagccatcgccgttttgctttttaacgtcgcggttttcgtttttcccttgatattgcagggttaagttcaggccatcgataacgccgaagaagtcggtgttccgatacgtcgccagaccgctggcgcgtttggtcataaagttgtcggtctgcgcgctggaatcgccaccaaattccgggaacatatcggtccaggcttccacgtcatacaacgcccccaggttacgaccataatcgaaagaacccaaatctttatatttcaacccggcaaaagcgagacgcgttttttgctgtgcagtatcactctctgctttattaccggcaaactctgcttcccaacgaccataaccagtcagttgatcgttaatttgtgtttcgcctttgaaaccaaaacggatataactctggtcgccatctttactggcgttatcactcatataatgcatggctttaactttgccatagacatccagtttattaccgtctttattatatatttctgcagcctgtacagatgcagatgccacaatgcccatcaccactaatgccagagtgctctttttcattttcattcctgattttaattaacgcgcgaatattcagcgggagagtcccgttgaaaacaggaaagtttttaacctgagattgttaaagatatattacagattaataatattcttaaaatgtggtaatttattaaatctgtaataaaagcgtaaacaactgccgctaggcttgctgatcccgcgcaacaaaacgccatgctttgctcgcagatggttggcaaccgacgacagtcctgctaaaacgttcgtttgatatcatttttcctaaaattgaatggcagagaatcatgagtgacagccagacgctggtggtaaaactcggcaccagtgtgctaacaggcggaagccgccgtctgaaccgtgcccatatcgttgaacttgttcgccagtgcgcgcagttacatgccgccgggcatcggattgttattgtgacgagcggcgcgatcgccgccggacgtgagcacctgggttacccggaactgccagcgaccatcgccagcaaacaactgctggcggcggtagggcagagtcgactgattcaactgtgggaacagctgtttagcatttatggcattcacgtcgggcaaatgctgctgacccgtgctgatatggaagaccgtgaacgcttcctgaacgcccgcgacaccctgcgagcgttgctcgataacaatatcgttccggtaatcaatgagaacgatgctgtcgctacggcagagattaaggtcggcgataacgataacctttctgcgctggcggcgattcttgcgggtgccgataaactgttgctgctgaccgatcaaaaaggtttgtataccgctgacccgcgcagcaatccgcaggcagaactgattaaagatgtttacggcattgatgacgcactgcgcgcgattgccggtgacagcgttagtggcctcggaactggcggcatgagtaccaaattgcaggccgctgacgtggcttgccgtgcgggtatcgacaccattattgccgcgggcagcaagccgggcgttattggtgatgtgatggaaggcatttccgtcggtacgctgttccatgcccaggcgactccgcttgaaaaccgtaaacgctggattttcggtgcgccgccggcgggtgaaatcacggtagatgaaggggcaactgccgccattctggaacgcggcagctccctgttgccgaaaggcattaaaagcgtgactggcaatttcagccgtggtgaagtcatccgcatttgcaacctcgaaggccgcgatatcgcccacggcgtcagtcgttacaacagcgatgcattacgccgtattgccggacaccacagccaagaaattgatgcaatactgggatatgaatacggcccggttgccgttcaccgtgatgacatgattacccgttaaggagcaggctgatgctggaacaaatgggcattgccgcgaagcaagccagctataaattagcgcaactctccagccgcgaaaaaaatcgcgtgctggaaaaaatcgccgatgaactggaagcacaaagcgaaatcatcctcaacgctaacgcccaggatgttgctgacgcgcgagccaatggccttagcgaagcgatgcttgaccgtctggcactgacgcccgcacggctgaaaggcattgccgacgatgtacgtcaggtgtgcaacctcgccgatccggtggggcaggtaatcgatggcggcgtactggacagcggcctgcgtcttgagcgtcgtcgcgtaccgctgggggttattggcgtgatttatgaagcgcgcccgaacgtgacggttgatgtcgctagcctgtgcctgaaaaccggtaatgcggtgatcctgcgcggtggcaaagaaacgtgtcgcactaacgctgcaacggtggcggtgattcaggacgccctgaaatcctgcggcttaccggcgggtgccgtgcaggcgattgataatcctgaccgtgcgctggtcagtgaaatgctgcgtatggataaatacatcgacatgctgatcccgcgtggtggcgctggtttgcataaactgtgccgtgaacagagcacaatcccggtgatcacaggtggtataggcgtatgccatatttacgttgatgaaagtgtagagatcgctgaagcattaaaagtgatcgtcaacgcgaaaactcagcgtccgagcacatgtaatacggttgaaacgttgctggtgaataaaaacatcgccgatagcttcctgcccgcattaagcaaacaaatggcggaaagcggcgtgacattacacgcagatgcagctgcactggcgcagttgcaggcaggccctgcgaaggtggttgctgttaaagccgaagagtatgacgatgagtttctgagtttagatttgaacgtcaaaatcgtcagcgatcttgacgatgccatcgcccatattcgtgaacacggcacacaacactccgatgcgatcctgacccgcgatatgcgcaacgcccagcgttttgttaacgaagtggatagctccgctgtttacgttaacgcctctacgcgttttaccgacggcggccagtttggtctgggtgcggaagtggcggtaagcacacaaaaactccacgcgcgtggcccaatggggctggaagcactgaccacttacaagtggatcggcattggtgattacaccattcgtgcgtaaataaaaccgggtgatgcaaaagtagccatttgattcacaaggccattgacgcatcgcccggttagttttaaccttgtccaccgtgattcacgttcgtgaacatgtcctttcagggccgatatagctcagttggtagagcagcgcattcgtaatgcgaaggtcgtaggttcgactcctattatcggcaccattaaaatcaaattgttacgtaagatcttatcattctcccaccaaaaaattatcttaatgtaacagctggtgtaagtaaattctatcaacgaagatcaatcttatctactgaccaaaaaggcctgatagggcttcgctcactatacatccttggctgcaggtttagttgtacaccactcctaaatttaatgtgttggcaatgtgttcaataaagctcgaacaaattagctcattatgatcggttaatacttcaacttctggttgcatgattgtttgtccgtaaaaagataacgcgcctgccgggtagtagcaggcgcattacgcaataggtaaacaagggaggaagttcagaaatgtaaatcgggaaggttgtacgcaatgttcatcgtactacgttgttacggctttgccgcaacaagccagttgcctgccgcgctcgcagaatgtctgcagcccggagataaggagattgttcctgccagctaaatcccttcctgtcgatacgaaccagctcgtatttttctaccagaaaattcacggcatcggctagggtgataccggcatcgatagtctgtatcaggaatgttcgggttaaatatcagcaaaaagcccgcatcatgaatactggatatgaagcatgagagttacctcagtgtttatataaggattcggtccccctctctggaacggtaactctcaatctgatcggttcctgcgttagttcacatcacgactcattttttcgctctcaccggcatcccatttgccacaaaatatcccgccgtgctcctcggcagcgcttcctgtccacgaatcatatccgctattttctcgccaatcataattgtcgtggcgttcaaattcccggtgataatctgcggcataatgctcgcatccaccacacgcaggccttctaacccgtgtacgcggccttcgccgtcaaccacggacatctcgtcgtaacccattttgcaggtaccgcacggatggaaggcggtttcggcgtggttacgcacgaactcatcgagctgttcatccgtctggcattcgacaccggggctgatttcgcggccacgatactgatccagcgcgggttgatgcatgatctcgcgggtgatgcgaattgcgtcgcggaactcctgccagtcctgctcgtggctcatgtagttaaacagaatcgccggatgctggtgcgggtcgcgggatttaatccgcacatgcccacggcttgggctgcgcatactgccgacgtggcactggaaaccgtgctctttcactgcattgctgccgttatagttaatcgctactggcaggaaatggtactgaatattcggccacgcaaattcctcacggctgcgaataaatccacctgcttcaaagtggttgctggcaccaacgccagtgccgccaaacagccactccgcaccgattttcggctggttccaccactgcagggcagggtagagggaaaccggttctttgcactcatattgcagatacatctccagatgatcctgaagattttcgccgacgccgggtaattcatgcaccagcggaatatcaaactccgccagcagttcagcgttgccgacgccggagcgttgcaggatctgcggactggcaatcgcgcctgcacataacagcacttctttgttggccgttgcgcgggttgggatggtgctgtcgccttccagccattcgacgcccaccgcgcgtttgccgtcaaaaatgatgtgatcggtcatagcgtgagtacgaatggtcaggttaggacggcttttggcctgatcgagatagccacgcgcggtgctggcgcgacggccctgcggcgtgacggtgcgatccatcggaccaaaaccttcctgctgataaccgttgagatcgtccgtgcgcgggtagcccgcctgcacgcccgcttcaatcatcgcttcaaacagcggattgacgccgggtttggaggtagtgacgctcaccgggccatcaccgccgtgatagtcgttttcacccatatcgcgagtctcggccttgcggtagtagggcaggcagtcgaggtagctccagttctccagaccgggttcttgcgcccagttatcgagatccagcgcattgccacggatgtagcacatgccgttgatcaggctgcttccacccagacctttaccgcgtccgcactccatgcggcggttattcataaacggttcaggttccgtttcataggcccagttgtagcgtttaccctgtagcgggaatgccagggcagcgggcatctgggtgcggaagtcaaagcgatagtccgggccgcccgcttcaagcagcagcacggaggtattcggatcttcagtcagacgggtagcgagaacgttgccggcactgccggcaccaataatgatgtagtcaaattgcaaataaacctcctggttagaatatggactggaatttagccatctcaacctggatggacttcacctgggtgtaactctggagcgtcatcacgccgttctcgcgaccaatgccggagtgtttgtagccgccaacgggcatctctgccggggattcgccccaggtgttgatccagcaaatacccgcttccagctgatgaatgacgcgatgcgcgcggttcaggtccgctgtcacgatgcccgccgccaggccgtagtcggtatcgttagcgcggcgaatgacttcgtcttcgctctcgtaggtcagaatggacatcactggcccgaagatctcttcacgcacgatggtcatatcgtcgctgcaatcggtgaacactgtcggtgcaacccatgcgccgttatcgaagccatcgcctttcagtacatcgccgccgcacagtacgcgcgcgccttcctctttgcctttggcgatatagcgcagcacgttatcgcgatgcgggaagctgaccagcgggccgaagttagtttgcggatcgaaaacgtcgcccgcgcgaatgcgctcaacgcgcgccagaattttctgctcaaatgcggctttgcatttcgccggaacgaagacgcgggtgccattggtacacacctgaccggagctgaagaagtttgccatcatggcgatatcggcggcgagatcgagatccgcatcatcgaaaacgatcagcggacttttaccgcccagttccatggtcacttctttcagggaagaggccgcgctgttagccatcacttttttgccgctggcgacaccgccggtaaaactcactttggcaatgcccggatgctcggtcagatattgcccggtctccgcgcccacgcccggcaacacgttaaatacgccgtccggcaggcccgcttcgctgtaaatttcagccagctttaacgcggtaagcggggtaacttcgctcggtttgaaaatcattgcgttgcctgccgccagcgccggggcggatttccacagggcaatctggatcgggtagttccatgcgccaatccctgccactacgcccagcggttcgcggcgggtatacacaaaggacgtttcacgcaacgggatctggctgccttccagcgccgggatcagcccggcgtagtactccagcacgtccgcaccggtaacgatatcgacggtactggtttcgctatatgcttttccggtgtcgagggtttccagttttgcgagttcgtcattgcgttcacgcagaatatcaacggcccgacgcagaatacggctgcgctccatggcggtcatgctcgcccagattttttgcccctgctgggcgcttttcacggcgcgatcgacatcctcgcgcccggcggcctgcacggtcgccagcacgttaccgttggccgggttaatggtctcgaaggtgcgaccgctggtggcggaggtataaccaccatgtatataaagctgctgttctgccattcgggacatcacgtctcctcggttaatcggtgggtagatgctgagtgataaagtggcgggtcagggaattagcgcgggttttatccagcggtttgccgctcagagccgcgcgcagccataatccatcaatcagcgcggccaggccgtagcccgcttcctgtgcctgttcgcgcggcaattcgcgacgaaactcgctcaccagattgctcagcaagcggcggctgctgacctgctgtaaacgatagagcatcggctgatgcatactgctggcccagaacgccagccaggctttcatcgccgcactgctcacctgcgtttcatcgaagtttccgccaacaatcgcctgtaatcgctgctctgcactgccctgcggaagtgcatgtaatcgattcaaaaccgcgtcacgcagctgactggtgatatcgcgcatggttgcttccagcagaccatttttgtccctgaaatagtggctgatgatccccgtagaaacgcctgcacggcgggcgatctgcgcgatcgttgcatcgtgcatgcccacttcatttattgcttccagtgtggcgtcgatcagttgtctgcgccggatgctctgcatccccaatttgggcattttcgccactccattcatcagcggtgtttatctattaaagcggttattgattggacgttcaatataaaatgtgtcttaattgttacgaatttgattttaaatagtaacaataacagtggggatactggatgacagaccttagtcacagcagggaaaaggacaaaatcaatccggtggtgttttacacctccgccggactgattttgttgttttccctgacaacgatcctgtttcgcgacttcagcgccctgtggattggccgcacgctggactgggtttctaaaaccttcggttggtactatctgctggcggcaacgctctatattgtctttgtggtctgtatcgcttgtagccgttttggtagcgtgaagctcgggccagaacaatccaaaccggaattcagcctgctgagttgggcggcgatgctgtttgctgccgggatcggtatcgacctgatgttcttctccgtagccgaaccggtaacgcagtatatgcagccgccggaaggcgcgggacagacgattgaggccgcgcgtcaggcgatggtctggacgctgtttcactacggcttaaccggctggagcatgtatgcgctgatgggcatggcgctcggatactttagctatcgttataatttgccgctcaccatccgcagcgcgctgtacccgatcttcggtaaacggattaacgggccgataggtcacagtgtggatattgcagcggtgatcggcactatcttcggtattgccactacgctcggtatcggtgtggtgcagcttaactatggcttgagcgtactgtttgatattcccgatagcatggcggcgaaagcggcactgatcgccttgagcgtgataatcgccacgatctctgtcacctccggtgtcgataagggcattcgcgtgttaagcgagcttaatgtcgcgctggcgctgggattgatcctgttcgtattgtttatgggcgacactagcttcctgcttaatgcactggtgctgaatgttggcgactatgtgaatcgctttatgggcatgacgctcaacagttttgccttcgaccgtccggttgagtggatgaataactggacgctcttcttctgggcatggtgggtggcatggagcccgtttgtcggcttgttcctggcgcgtatcagccgtgggcgtaccattcgccagttcgtgctgggcacgttgattattccgtttaccttcacgctgttatggctcagcgtgttcggcaatagcgcgctgtatgaaatcatccacggcggcgcggcatttgccgaggaagcgatggtccatccggagcgcggcttctacagcctgctggcgcagtatccggcgtttacctttagcgcctccgtcgccaccattactggcctgctgttttatgtgaccagcgcggactccggggcgctggtgctggggaatttcaccagccagcttaaagatatcaacagcgacgcccccggctggctgcgcgtcttctggagcgtggcgattggcctgctgacgctcggcatgctgatgactaacgggatatccgcgctgcaaaacaccacggtgattatggggctgccgttcagctttgtgatcttcttcgtgatggcggggttgtataaatctctgaaggtagaagattaccgccgtgaaagtgccaaccgcgataccgcaccgcgaccgctggggcttcaggatcgcctgagctggaaaaaacgtctcagccgcctgatgaattatccgggcacgcgttacactaaacagatgatggagacggtctgttacccggcaatggaagaagtggcgcaggagttgcggttgcgcggcgcgtacgtggagctaaaaagcctgccaccggaagagggacagcagttgggtcatctggatttgttggtgcatatgggcgaagagcaaaactttgtctatcagatttggccgcagcaatatagcgtgccgggctttacctaccgcgcacgcagcggtaaaagcacctactaccggctggaaaccttcctgttagaaggcagccagggcaacgacctgatggactacagcaaagagcaggtgatcaccgatattcttgaccagtacgagcggcaccttaactttattcatctccatcgtgaagcgccgggccatagcgtgatgttcccggacgcgtgattgttattgcataaaaccgcgccatgtctgcatatggcgctgtttctcctacctcttgatacgttatatctatacggttaagcccttagtatctattgatgattaccagacaacagataataaaaaagaaaagaactattgcagcccaaaacctacatttgggctgttgcgaatgttcaataagtttagtcttatttaatgtaaatattgctgatcatttgaaatgacgcattattcatgagaaatgtgtatcgtaaatcaactgaaattaacgcaaccatttgttatttaaggtttaattatctgtgtgtgatattttattgaatgttttaaatattgtttttattggcattgctataatattggttatcatttgctgaatggattcagtcttaatgagtgggtttttaagggacaggcatagagtaatgatacgtatgcataaccaacatctttactcattatgtcattgaatgttgacgctatgtgtttatgagggagaggtattttcagttgatctggattgttaaattcatataatgcgcctttgctcatgaatggatgccagtatgtagtgggaaattataaatattgaaatagtccaactacttctttattaccaaaaatgagtatctgaattttaatattgcattcttgcgtgattatctcctgagtttgacttgtgattacctttttaaggtatttagcgtaactgtttttgagcgagcatcagaggtaaagataatcttcttgatagtgatgtgggatgttatacgtatggcatcgctgatgtttatggttaccccttatgtgtgctcaggaatcgacaggtaatcactcatactgaacagcgataaaagataaaggtgtgttcatgaatagttgtgattttcgtgtttttctgcaagagttcggtacaacggttcatttgagtttgcctggtagcgtatccgagaaagaacgactgctactcaagctgctgatgcagggaatgtctgtaacagaaataagtcagtacagaaatcgcagtgcaaagacaattagtcatcaaaagaaacagctctttgagaaactggggattcagagcgatattactttctggcgcgatattttctttcagtacaatccggagatcatatccgccacggggagtaatagtcacagatatattaatgataatcactatcaccatatcgtcacgcctgaagccatcagtctggcgttggaaaaccacgaattcaaaccgtggatccaaccggttttctgcgcgcagactggcgtactgacgggctgtgaggtgcttgtccgctgggaacatccacaaacgggaattatcccaccggatcagtttattcctctggcggagagttccggtcttattgtcataatgacccgccaactgatgaaacagactgcggatattctgatgccggtaaaacatttgctgccggacaatttccatattggcatcaacgtcagcgcgggttgttttttggcagcgggatttgaaaaagagtgtctgaacctggttaataaattaggtaacgataaaatcaagctggttctcgagctaacggaacgtaaccctattccggtaacgccagaagccagagcgatatttgacagccttcatcagcacaacattacctttgcgctggatgactttggtacgggttatgcgacctatcgttacttgcaggcgttcccggtcgattttattaagatcgataagagttttgtgcaaatggcgagtgtcgacgaaatctccggtcatattgtggacaatattgtcgaactagcgcgtaagcctggtctgagtatcgtggcggaaggggtagaaacccaggagcaggcggatttaatgatcggtaaaggcgttcactttttgcagggctatttgtactctccgccagtaccgggtaataaatttatctctgaatgggtaatgaaagcaggtggttgatgtaaaccgctattcacagcgcatcgggaggttggcagcgattaattctcccgatgcagtaaatcctgatagatccccgttaatatgccatttggcgcaaattgttttttaatccactgcgtcacctgacccgtagcagaatgctgagtcgccagtaacatgcggctatcctggcgcggattatggatttgtcgggtaaccagcagggattgcgtcatcgcctcacggaccatgtaatccggcaaaaaaccaattccttcacctaaaatctggcactgacatttggtgttgaaatctggcaccagaatactctcctgcccgtgcagcaaccagcccacttttttattaatcgtatgcgcggtgtcctccaccataatattagggtagagacgcagttggctttcggcgatgggttccggcacaaaggctaacgggtgatccggggcgatagcaaaagcccagcgaatcgcgccaatttcagtgtaatcaataccgccgccgtccagtagtgtatcgggtgcgccgatggcgatattggcctgattattaataatcgcatcccagacgccgttatacacttcggtggtgacggtaatctggcaggtaggaaactgctttttcagcacctgtaacaagcgtgcggtgtgtttgggcgtataaagcagctgattaatacaaatgcgcacacgcgcttctatgccctggctaatagtatcgattctgcgtttgatggcataaaaatcattcagcaggtcggtagctttgcggaaaaaataacgcccggactccgttaactcaatgctgcgggtactgcgagtgaacagcaccacatccagccccgtctccatacgcttaatggtgtagctaatggcggaagtggttaaacccaactcttctgcggctttactgaagctgccaaaacgcgcagcggtagtaaatgccaacagattctcttcggtaaaaatactgttcattaaaccattctcgccattatctactatgaatttctccagctatgactgtagaggtatcggttaaagatagataatcatttttgaataacttttaatacccgtcgcgtttagtcgtcgcttcgcttaatttttgtccaccatattcactaattacccccacgcagttacccgccagaaaacccagtaacgtcaccgtccagttcatcccgctggcaaaaaacagcgtcatgccgagaaagccaccgggaataaaggacagtaaccagaaacgcccttgccagaccactaccgcgctgaagggtacggtagtaattacgctcgcccagaacgcggacagtccacttacagaggccagccaaccagcagtcagcgcggcgaaaaacgcccacaccatcccggaataattaaccgccagacttctgataaacccgcttttaccgccgcctgcggcataaaaactgcaaaaggcgacgaagccaatggttcctaataattcccatccttgagagagcccgacatgactagacactaactgccaaagccctgcacaaataccgacggtgacacccgttgccgtgagtccgttcatcttgttcccctctggttagacatggacgaaagctactcttacatgtgcagactatagagaaataaaacctgattgagtgaaagggtatcgggtcaaagaaacaaatattgcactaccgcacactgcgaaaagattgttgaatattattcaacaaaaaggcgagatacggcgaattaaatttaagcgggttcttttatcagattatcgttgctattctcaattcatcgaaaacagccacaaaaaccaggggaatgtgaatgagtataaaaaatctacctgccgactatttattggctgcacaacagggtgatatcgataaagtaaaaacctgccttgcgctgggtgtcgatattaatacctgcgatcgtcaggggaaaacggcaattacgctggcaagtttatatcagcaatatgcttgcgttcaggcattaattgatgccggagcggatattaataagcaagattatacctgtttaaatccttttttaattagctgtctgaacgatgatttaacgctactacgaattattttaccggctaaacccgatcttaattgcgtaacccgttttggcggtgtcggcctgacgcctgcctgtgaaaaaggccatttaagtattgtaaaagagcttttggcgcatacggagattaacgttaaccagaccaaccatgtaggctggacgccgctactggaagcgattgtgcttaatgatggtggtattaaacagcaggcgattgtgcagttattgctggaacacggtgccagcccgcatctgaccgataaatatggcaaaacgccactggaactggcgcgggaacggggctttgaagagattgcgcagttactgattgccgcaggtgcataaaccgggaggcttgctatcaacacaccagaaagacggtgtgtgtgggcgctaactgcggatgcggattttctggcgcagcgggggcaaggacaggttgaacaggtctttgccagagcggtaaatatcgcactcccggctcgccagcagttgctgacgctgctttgtgaagagtacgacaatgcgccaaacagttgtcggttggcactcactcactttgatgatctgttccggcatggtgataaggttcagtttgacgatcaaggtattacggttggtcaacatcttcatatagagatgagtcgttgtcggcgttggctgtccccaaccttgcaaatgaccgctgtgaattttcaccttatcgcctggctacagtggcacgacattattcatcagcacctgggggaaaatgaaaccctgtttaattatcgcggcgataatccgttttatcaggcgttaaataaagaattacatattaaacgacgggcagttattcaggccgtaaacgataaacaaaatatcgccagtgcggtcgccagtatgatggggttagggattggccttacgccaagtgccgacgattatttaacaggtctggcgcttattttatttattcccgggcatccggcggaaaaatacaaagaggaattttatctcggtctgcaacgcggcaaaaataataccacattattaagtgccataacgctggaagccgcattacaacaacgctgccgggaaaatattcatcgttttattcacaacattatttatgacatccctgggaacgcaactcaggcaatagaaaaaattaaacatattggctccagttccggctgcgacatgctgtatggcatggccgatggttgtgcgctgagccaaacctacggagggaattatgtcagttaattaaccaaacctacggagggaattatgagtgttaaaatagtcattaaaccgaatacctattttgattctgtcagcctgatgtctatctccacgcgtgcaaataaactcgacggcgtcgagcaggcatttgtggcgatggcgaccgaaatgaataaaggcgtgctgaagaatttaggactgctgacgccggagctggagcaggcgaaaaacggcgacctgatgattgtcatcaatggtaaaagcggtgcggacaacgagcagttactggtggagattgaagaactgttcaacaccaaagcgcaaagcggcagccacgaggcgcgttacgccactattggcagcgccaaaaagcatatcccggaaagtaacctggcggtgattagcgtcaacggtctgtttgccgctcgcgaagcgcgtcaggcgctgcaaaacgatctcaacgtgatgctgttttccgataacgtcagtgttgaagatgaactggcgctcaagcaactggcccacgaaaaagggctgctgatgatggggccagactgtggcacggcgattatcaacggcgcggcgctctgttttggtaacgccgtgcgtcgcggcaacatcggtattgttggcgcatccggcaccggcagtcaggagttgagcgtccgcattcatgaatttggcggcggcgttagccaactgattggcaccggcgggcgcgacctgagcgagaaaatcggcggcctgatgatgctcgacgccatcgggatgctggaaaacgatccgcaaactgaaatcattgcgcttatctccaaaccgcctgcgcctgcggtggcccgcaaagtgctggaacgtgcgcgcgcctgccgcaagccggtggtcgtctgcttcctcgatcgtggcgaaacgccagtggatgagcaggggctacagtttgcccgcggcaccaaagaggcagcgctaaaagcggtgatgctctccggcgtgaaacaggaaaatctcgacctgcatacgcttaaccagccgttgattgcggatgtgcgtgcgcgtctgcaaccgcagcagaaatacattcgtggcctgttctgcggcggcacgctgtgcgacgaaaccatgttcgcggtgatggaaaaacatggcgatgtctacagcaacattcagcccgatccggaattccgcctgaaagatatcaaccgcagcatcaaacacaccttcctcgactttggcgatgacgacttcaccaatggcaagccgcacccgatgattgaccccaccaaccgcatcagtcgcttgatcgaagaggcgcgcgatccagaagtggcggtgatcgtgatggattttgtgctcggatttggaagccatgaagatccggtcggctccaccatcgagacgatcaaagaagcgaaagcgatcgccgctgccgaaggacgcgagttgatcattctcgcctatgtgctgggtaccgatcttgatacgccaagcttagaacaacaaagccagatgctgcttgatgccggagtgattctggcgagcagcagcaccaataccggattgctggcgcgtgaatttatctgcaaaggggaggaagcctgatgagccagagtctgtttagccaaccattgaacgttattaacgtcggcatcgccatgtttagcgatgacctgaaaaagcagcatgtagaagtgactcaactcgactggacgccgccggggcagggcaatatgcaggtggtgcaggcgctggataacattgccgatagcccgctggcggacaaaatcgccgccgctaaccagcaggcgctggagcgtattatccagagccatccggtgctgattggttttgatcaggcgattaacgtggtgccgggcatgacggcgaaaaccattcttcacgccgggccgccgatcacctgggaaaaaatgtgcggcgcgatgaaaggcgcggtcaccggagcgctggtgttcgaaggactggcgaaagatctcgacgaggcggctgaactggcggcttccggggagatcaccttcagcccgtgtcacgagcacgactgcgtgggaagcatggcgggtgttaccagcgccagcatgtttatgcacatcgtaaaaaacaaaacctacggcaacatcgcttataccaacatgagcgagcagatggcgaagattttgcgtatgggcgctaacgaccagagcgtgattgaccgcctgaactggatgcgtgatgtgcagggaccaatactgcgcgacgcgatgaaaattatcggcgaaatcgatctgcgcttaatgctggcgcaggcgctgcatatgggcgatgagtgccataaccgcaataacgccgggacgacactgctgattcaggcgctgacgccggggattattcaggcgggttattccgtcgagcaacagcgcgaagtgtttgagtttgtcgccagcagcgactacttctccggcccgacgtggatggcgatgtgtaaagcggcgatggatgcggcgcatggcatcgaatacagcaccgtggtcaccaccatggcgcgtaacggcgtcgagttcggcctgcgggtcagcggcctgccggggcaatggtttaccggcccggcgcagcaggtgatcggcccgatgtttgccggttataagccggaagatagcgggctggatatcggcgacagcgccatcaccgaaacctacggtattggcggatttgctatggcgaccgcgcccgctatcgtcgcgctggtgggcggcacggtggaagaagctattgatttctcccgtcagatgcgcgaaatcaccctcggtgaaaaccccaacgtcaccattccgctgctcggttttatgggcgtgccgagcgcaatcgacatcacccgcgtgggtagcagcggcattctgccggtgatcaacaccgccatcgcccataaagatgcgggcgtcggcatgattggcgcgggcattgtgcatccaccttttgcctgcttcgagaaagccattcttggctggtgcgaacgttacggcgtctgacctacatgttcatgccggatgcggcgtgaacgccttatccggcctacgaatggcgcaagaatctgtaggcctgataagcgtagcgcatcaggcatttgtcaccattgccggatgcggcgtgaacgccttatccggcctacgaatggcgcaagaatctgtaggcctgataagcgtagcgcatcaggcatttgccaccactgccggatgcggcgtggacgccttatccggcctacgagtggcgcgagaatctgtaggcctgataagcgtagcgcatcaggcatttgtcaccattgccggatgcggcgtgaacgccttatccggcctacgagtggcgcgagaattgtaagcctgataagcgtagcgcatcaggcagtctggcgttggtcataaccccatcaccctctgtagcggacataacaacatgaaagagcttgtggtcgttgccattggtggcaacagcattatcaaagataacgccagccagagcattgagcatcaggcggaggcggtgaaagccgtcgccgatacggtgctggaaatgctggcttccgattacgacattgtgctgacccacggcaacgggccgcaggtcgggctggatttacgccgtgcggagattgcccacaagcgcgaagggctgcccttaacgccgctggcgaactgtgtggcagatacgcagggcggcatcggctatctgatccaacaggcgctgaataaccggctggcgcgtcacggcgagaagaaagccgtcaccgtggtgactcaggtggaagtggataaaaacgatccaggttttgcccatcccaccaagcccatcggcgcattctttagtgacagccagcgtgacgaattacaaaaggcaaaccctgactggtgttttgttgaagatgccgggcggggctatcgccgcgtggtcgccagcccggaaccgaaacgtattgtcgaagcacctgccattaaagcgctgatccaacaaggttttgtcgtaattggcgcgggcggcggtggaattccggtagtgcgtactgacgcgggagattaccaaagcgtggacgcggttatcgacaaagatctctctaccgcgctgctggcccgtgaaattcacgccgacattcttgtgatcaccactggcgtcgaaaaagtgtgtattcactttggcaaaccgcagcagcaggcgctcgatcgggtggatattgccaccatgacccgctatatgcaggaagggcatttcccgcccggcagcatgttgccaaaaatcatcgccagcctgacatttttagaacaaggcggcaaagaagtgattatcaccacgccggaatgcctgcctgcggcgctgcgcggcgaaacgggcactcatattattaaaacgtaaggacgtaagatgaaagaaagcaatagccgccgtgaatttctgagccagagcggtaagatggtcaccgccgccgcgctgtttggtacctctgtgccgctcgcccatgcggcggtagctggcaccctaaactgcgaagcgaacaacaccatgaaaatcactgacccgcattactatctcgataacgtgctgctggaaaccggttttgactacgaaaatggcgtggcggtgcagacccgcacggcgcgccagaccgtggagattcaggacggcaaaattgtcgccctgcgcgagaacaagctgcatccggacgccacgctgccgcactatgacgctggcggtaagctgatgctgcccaccacccgcgacatgcatattcatctcgacaaaaccttttacggcgggccgtggcgcagcctcaatcgtccggcaggcaccaccatccaggacatgatcaaactcgagcagaaaatgctgccggaactgcaaccgtacactcaggagcgggcagaaaaactgattgatttattgcagagcaaaggcaccaccattgcccgcagccactgcaatatcgaaccggtttccggcctgaaaaatctgcaaaatttgcaggcggtgctggcgcgacgtcaggcgggctttgagtgtgaaatcgtcgccttcccgcagcacggtttgctgctgagcaaatctgaacctttaatgcgtgaagcgatgcaggcgggggcgcattacgtcggcggcctggacccgaccagtgttgatggcgcgatggaaaaatccctcgacaccatgttccagattgcgctggactacgacaaaggcgtcgatattcacctgcacgaaaccactccggcaggcgtggcagccatcaattatatggttgaaacggtagagaaaacgccacagctgaagggcaagctgaccatcagtcacgcctttgcgctggcaacgctcaacgagcaacaggtagatgaactggcgaaccggatggtggtgcaacaaatttctatcgccagcacggtgccgattggcacgctgcatatgccgctcaaacagttgcacgacaaaggcgtaaaagtgatgactggcactgacagcgttatcgaccactggagcccttatggtctgggcgacatgctggaaaaagccaatctgtacgcgcagctctatattcgtcctaacgaacagaacctctcccgcagcctgtttttagccactggcgatgtattgccgctgaatgaaaaaggcgagcgtgtatggccaaaagcgcaggatgacgccagctttgtgctggtggacgcctcctgttccgccgaggcggtggcgcgtatcagcccgagaaccgcaacgttccataaagggcaactggtgtgggggagtgtggcaggttgatgcgcatttgaaacgcctgcaacggtgaatagtaagagatttaagccccagggagtggggcaatctgaatatgagtgtgtcggcagaaatggacattatctttgaggaatatgcccttattgacgttgtgtagataactatttgtctacgtgaaaagatcatcagttttgccgattttagtcttttacagatagcaaatatcacacttacaggcgctcgccttatggggaacgttgctgctctgtttcattcaggctcgcggcatgttggggctggatcgggtggtttaaatattggctatattcaatggacgcgttttgccgcgatgacatatcaggcgttgccaaatacacatagctaatcaggagtaaacacaatgaagatcaaagctgttggtgcatattccgctaaacaaccacttgaaccgatggatatcacccggcgtgaaccgggaccgaatgatgtcaaaatcgaaatcgcttactgtggcgtttgccattccgatctccaccaggtccgttccgagtgggcggggacggtttacccctgcgtgccgggtcatgaaattgtggggcgtgtggtagccgttggtgatcaggtagaaaaatatgcgccgggcgatctggtcggtgtcggctgcattgtcgacagttgtaaacattgcgaagagtgtgaagacgggttggaaaactactgtgatcacatgaccggcacctataacagcccgacgccggacgaaccgggccatactctgggcggctacagtcaacagatcgtcgttcatgagcgatatgttctgcgtattcgtcacccgcaagagcagctggcggcggtggctcctttgttgtgtgcagggatcaccacgtatagcccgctacgtcactggcaggccgggccgggtaaaaaagtgggcgtggtcggcatcggcggtctgggacatatggggattaagctggcccacgcgatgggggcacatgtggtggcatttaccacttctgaggcaaaacgcgaagcggcaaaagccctgggggccgatgaagttgttaacagtcgcaatgccgatgagatggcggctcatctgaagagtttcgatttcattttgaatacagtagctgcgccacataatctcgacgattttaccaccttgctgaagcgtgatggcaccatgacgctggttggtgcgcctgcgacaccgcataaaagcccggaagttttcaacctgatcatgaaacgccgtgcgatagccggttctatgattggcggcattccagaaactcaggagatgctcgatttttgcgccgaacatggcatcgtggctgatatagagatgattcgggccgatcaaattaatgaagcctatgagcgaatgctgcgcggtgatgtgaaatatcgttttgttatcgataatcgcacactaacagactgaaaaaattaataaataccctgtggtttaacatattaacttcgctctccacttaactttttagttaaggagagcgaaataatatcaaagtagcagtaaaacctataacgtaaatttaaattgttaaattaacgccctccagtacacaatacttcacacgttagttatgagcgatttctgatagtgcctggtttaatcagagctttattatctgcgacgtttatttttatttaagagagatcgcgatgataagtttaaaagctccgcacaataatttgatgccatatacgcaacaaagcatacttaatacggttaaaaacaatcagttaccagaggatatcaaaagctccctggtttcctgtgtcgatatattcaaggttttgattaaacaatattatgattatccttatgattgtcgtgatgatttagtcgatgacgacaaactcattcatctcatggctgccgtacgagactgtgagtggagtgacgataacgcactcaccataaatgtgcagtttaatgatttccctggattttatgactggatggattaccctgatcacccggttaagtttgtttttcacatacttgaaaatcaaaaagggacagtttgggtatatgaccaggatgatgcgtttcttgatattaaagcaaacgtgcaggctggacgctttaccgggcttaagaaattagtgcagtttatcgatagtgtgcgaacagattgcaaatgtattcttcttgaataccatatgcctttgctgagaattttccctaaagggaaagagtgtatgcatgtggaaaaatggcttcgcgaaatgagctctattccggagacagacgcgcccattaagcaggcgcttgcgcatggattattattacacttaaaaaatatctaccctgtttttcctgaaagtctggtgatgttattgctctctgttctggacgtaaaaacatacagagatgatgcgcgattaaatgaatggatatctaatagagtgcaggaattaggtgacagatattatcctgtaaataagcacgttaaaatccgctacactctttaattcagaaagggttccacctgcaagttgttattccacctgagagtgaatcgcaatgcaggtaatcatttcatctgtatatctgtatgccaactggcattccatctcttttttcgccgatattttgttgtgatcggcgacacttcgcttaaaaaagcaccagtagtggtttcgcagccatgcggtgtataaaaaatgatctcatgcagatgttttgtgaatgtgttggttgacattcatatgaaaaaaatcataattccatcatgtttgtgtggggtcttttctgtatcttacgcatcgcactcaagcctgacagaaaatatgctgtaaggctcatatcaaaaaccgccattagctcatcaggaagagcagacgacaaccaggattgttgtatggtacggggttcgaggcctcgatggcggtccaacttttcaaaactcttctgaatcagatccccttattaagttccctgcaaagtggaacattgccattgtttggctatagtggatggggcagaccaatgaaaaaagcccacacaggggagagtgggctgaaatgggaggctaaagacagtagtaaacttatcggaaataaggaccacgcattacgggggctaagtagcccgatggccgtgattcggcaaatcaggttgattacgtaaagagtaaattatctgctcaccgctgcgtcaccccttcgtaaatcaggcgtagcgcgaatacaccaataattgcaccaataacccgactggcaacgcgttgcatacgcccataagcacgacgcacagcgggcaaagaaaacgcctgactaagaaaaactcgccagataatacttgcgagcacaatccccgcccaggccattaaacgtgcccatgttggtgtttctgcatttaatgttacactgaaaatactgataaaaaataaaacggtttgcgggttagagagatcggtaattaatccgcggcgaaaaaagacataccagggggcgctaatcggttgttgtagtgtgctcatttgcggtgtactctggcggcgcatgctgcaccacgcaaaccataagagataagcgccgccgacgattctgataaggctaaaaatctcctcacactgcgtaattagcgttgcaagaccaaacaaacccaacccggaataaaatgcatcgcccagcgccacgcccagcccggtcagcacccctgcgcgtcgaccggaagccaggctggtttgtactaccacaaagagattggctcccggattaaaaaaagtaatcacgaacagtcctacggtcaggtaaacggcatgcaaaggatccatagtgatttcatccataaataagtgaactaactgcatcatatttctaccaaaaataatcgggtgcgagagagatcacaaagtgtcttatttccggttactggcgtttatgccctgactgaactaattattaatcaacccaataatgtgggtgggtgatagtgtgataacaactctggagccgtaatatgaaaataatctctaaaatgttagtcggtgcgttagcgttagccgttaccaatgtctatgccgctgaattgatgaccaaagcggaatttgaaaaagttgaaagccagtatgaaaaaataggtgatattagtaccagcaatgaaatgagcactgcagatgcaaaagaagatttgatcaaaaaagcggatgaaaaaggggctgatgtgttggtactgacctccggtcaaactgacaataagatccacggcacggcaaatatttataagaagaagtaattctgaatcctatgtaaacatctccgatgcgtaagtttatcggtgatcatctattgaaatttatgccggataaagcgttcgcgctgcattcggcagttcagcttttcagccgccgccagaacgtcgtccggctgatgcctaaataattcgccgctgctgttttatcgccattaaatttctccagtgcctgttgtggtgtcagtaagcgtggagcgggagttttcgcgctctcgcgcgccagttccggcagtagcagttgcataaactgcggcgttaaatccggcgtcggttccacacttaaaaacagcgccagtcgttccatcatattgcgcagttcacgaatattgcctggccagtcgtagtgcagcagcacagtttcacttgcctgtaacccctggcgtaatgcagcagaaaatggggcggagagcgccgccagagacactttcaaaaagctttccgccagcggaagaatatccgccacccgctcgcgcagtggtggcaattgcagacgcaaaatactcagccgataaaacagatcacggcgaaaacgtccttgctgcatatcttcttccagattgcagtgagtggcgctaatgacccgtacatctaccggaacaggctgatgcccgccgacgcgggtgacctctttttcttccagcacccgcagcagccgggtctgcaaaggtagcggcatttcgccaatctcatccagaaacagcgtaccgccgtgggcaatttcgaacagcccggcgcgacctccgcgtcggctgccggtaaacgccccttcctcatagccaaacagttctgcttccagcaggctttcggcaatcgccccgcagttgacggcaacaaacggatggctctttttgccctgtcgcgcatcgtggcgggcaaaatattcccgatgaatcgcctgggccgccagctctttgcccgtccccgtttccccctcaatcaacaccgccgcactggagcgggcatacagcaaaatagtctgccgtacttgttccatctgtggactttgaccgagcatatcgcccagcacgtaacgagtacgcagggcgttgcgggtggcatcgtgagtgttatggcgtaagctcatgcgcgtcatatccagcgcatcgctgaacgcctggcgcacggtggcggcggaatagataaaaattccggtcattccggcttcttctgccaaatcggtaatcagccctgcgccgaccaccgcttcggtgccgttagcttttagctcgttaatctgcccgcgtgcgtcttcctcggtaatgtagctacgttggtcgaggcgcaaattaaaggttttttgaaacgccaccagcgctggaatggtttcctgataggtgacaacgccgatagaagaggtgagttttccggcttttgccagtgcctgtaacacatcgtagccgctcggtttaatcaaaataactggcacactcaggcggcttttcaggtacgcgccgttagagccagccgcgatgatggcgtcacagcgttcgtttgccagtttcttgcggatgtaggtcactgctttttcaaagccaagctgaataggggtaatgttcgccaggtgatcaaactcgaggctgatatcgcgaaacagctcgaacaggcgcgttacagataccgtccagataaccggtttgtcgtcattaagccgtggtggatgtgccatagcgcaccgcaaagttaagaaaccgaatattgggtttagtcttgtttcataattgttgcaatgaaacgcggtgaaacattgcctgaaacgttaactgaaacgcatatttgcggattagttcatgactttatctctaacaaattgaaattaaacatttaattttattaaggcaattgtggcacaccccttgctttgtctttatcaacgcaaataacaagttgataacaaaggatgggctatgtctctacactctccaggtaaagcgtttcgcgctgcactgactaaagaaaatccattgcagattgttggcaccatcaacgctaatcatgcgctgttggcgcagcgtgccggatatcaggcaatttatctttctggcggtggcgtggcggcaggtagcctggggctgcccgatctcggtatttctacccttgatgatgtgctgaccgacattcgccgtatcaccgacgtttgtagcctgccgctgctggtggatgcggatatcggttttggttctagcgcctttaacgtggcgcgcaccgtgaaaagcatgattaaagccggtgcggcaggattgcatattgaagatcaggttggtgcgaaacgctgcggtcatcgtccgaataaagcgatcgtcagcaaagaagagatggtggatcggatccgcgcggcggtggatgcgaaaaccgatcctgattttgtgatcatggcgcgcaccgatgctctggcggtagaggggctggatgcggcgatcgagcgtgcgcaggcctatgttgaagcgggtgccgagatgttgttcccggaggcgattaccgaactcgccatgtaccgccagtttgccgatgcggtgcaggtgccgatcctcgccaacatcaccgaatttggtgccacgccgctgtttaccaccgacgaattacgcagcgcccatgtcgcaatggcgctgtacccacttagtgcgttccgcgccatgaaccgcgccgctgaacatgtctacaacgtcctgcgccaggaaggcacgcagaaaagcgtcatcgacaccatgcagacccgcaacgagctgtacgaaagcatcaactactaccagtacgaagagaagctcgacaacctgtttgcccgtagccaggtgaaataaaaaacgcccgttgattgtattcgacagccgatgcctgatgcgtcgctgacgcgacttatcaggcctacgaggtgcactgaactgtaggtcggataagacggatggcgtcgcatccgacaaccgatgcctgatgcgccgctgacgtgacttatcaggcctacggggtgcactgaactgtaggtcggataagacgcatagcgtcgcatccgacaaccgatgcctgatgcgccgctgacgcgacttatcaggcctacggggtgcactgaactgtaggtcggataagacgcatagcgtcgcatccgacaaccgatgcctgatgcgccgctgacgcgacttatcaggcctacggggtgaactgaactgtaggtcggataagacgcatagcgtcgcatccgacaacaatctcgaccctacaaatgataacaatgacgaggacaacatgagcgacacaacgatcctgcaaaacagtacccatgtcattaaaccgaaaaaatctgtggcactttctggcgttccggcgggcaatacggcgctctgcaccgtgggtaaaagtggcaatgacctgcattaccgcggctacgatattcttgatctggcgaaacattgcgaatttgaagaagtggcgcatctgctgatccacggcaaactgccgacccgtgacgaactcgccgcttacaaaacgaaactgaaagccctgcgcggtttaccggctaacgtgcgtaccgtgctggaagccttaccggcggcgagccacccgatggatgttatgcgcaccggtgtttccgcgctcggctgcacgctgccagaaaaagaggggcataccgtctctggcgcgcgggatattgccgacaaactgctggcgagccttagcagcattctcctttattggtatcactacagccacaacggcgaacgcatccaaccggaaaccgatgacgactccatcggcggtcacttcctgcatctgctgcacggcgaaaagccaagccaaagctgggaaaaggcgatgcatatcagcctggtgctgtacgccgaacacgagtttaacgcctccacctttaccagtcgggtgattgcgggcaccggctctgatatgtattccgcgattattggcgcgattggcgcactgcgcgggccaaaacacggcggggcgaatgaagtgagcctggagatccagcaacgctacgaaacgccggacgaagccgaagcagatatccgcaagcgcgtggaaaacaaagaagtggtcattggttttggtcatccggtttacaccatcgctgacccgcgccaccaggtgattaaacgtgtggcgaagcagctcagccaggaaggcggcagcctgaagatgtacaacatcgccgatcgcctggaaacggtgatgtgggagagcaaaaagatgttccccaatctcgactggttctctgctgtttcctacaacatgatgggcgttcccaccgagatgttcacaccactgtttgttatcgcccgcgtcaccggctgggcggcgcacattatcgaacaacgtcaggacaacaaaattatccgtccttccgccaattatgttggaccggaagaccgcccgtttgtcgcgctggataagcgccagtaaacctctacgaataacaataaggaaacgtacccaatgagtgctcaaatcaacaacatccgcccggaatttgatcgtgaaatcgttgatatcgtcgattacgtcatgaactacgaaatcagctctaaagtggcctacgacaccgcacattactgcctgctcgacacgctcggctgcggtctggaagctctcgaatacccggcctgtaaaaaactgctggggccaattgttcccggcaccgtcgtacccaacggcgtgcgcgtccccggaactcagttccagctcgaccccgtccaggcggcatttaacatcggcgcgatgatccgctggctcgatttcaacgatacctggctggcggcggagtggggccatccttccgacaacctcggcggcattctggcaacggcggactggcttagccgcaacgcggtcgccagcggcaaagcgccgttgaccatgaaacaggtgctgaccgcaatgatcaaagcccatgaaattcagggctgcatcgcgctggaaaactcctttaaccgcgtcggcctcgaccacgttctgttagtgaaagtggcttccaccgccgtggtcgccgaaatgctcggcctgacccgcgaggaaattctcaacgccgttagcctggcgtgggtggacggtcagagcctgcgcacctatcgccatgcgccgaacaccggcacgcgtaaatcctgggcggcgggcgatgccacttcccgcgcggtacgtctggcactgatggcgaaaacgggcgaaatgggttacccgagtgccctgactgcgccggtgtggggcttctacgacgtctcctttaaaggtgaaagcttccgcttccagcgcccgtacggttcctacgttatggaaaatgtgctgttcaaaatctccttcccggcggagttccactcccagacggcagttgaagcagcgatgacgctctatgaacagatgcaggcagcaggcaaaacggcggcggatatcgaaaaagtgaccattcgcacccacgaagcctgtattcgcatcatcgacaaaaaagggccgctcaataacccggcagaccgcgatcactgcattcagtacatggtggcgatcccgctgctattcgggcgcttaacggcggcagattacgaggacaacgttgcgcaagataaacgcattgacgccctgcgcgagaagatcaattgctttgaagatccggcatttaccgctgactaccacgacccggaaaaacgcgccatcgccaatgccattacccttgagttcaccgacggcacacgatttgaagaagtggtggtggagtaccccattggtcatgctcgccgccgtcaggatggtattccgaaactggtcgataaattcaaaatcaatctcgcgcgccagttcccgactcgccaacagcagcgcattctggaggtttctctcgacagagctcgcctggaacagatgccggtcaatgagtatctcgacctgtacgtcatttaagtaaacggcggtaaggcgtaagttcaacaggagagcattatgtcttttagcgaattttatcagcgtagcattaacgaaccggagcagttctgggccgagcaggcccggcgtattgactggcagacgccctttacgcaaacgctcgatcacagcaatccgccgtttgcccgttggttttgtgaaggccgaaccaacttgtgccacaacgccatcgaccgctggctggagaaacagccagaggcgctggcgctgattgccgtctctagcgaaacagaagaagagcgcacctttacctttcgtcagctgcatgacgaagtgaacgcggtggccagtatgttgcgtagtttgggtgtgcagcgcggcgatcgggtgctggtgtatatgccgatgattgccgaagcgcatattactctgctggcctgcgcgcgcattggcgctattcacagcgtggtgtttggtggatttgccagccacagcgtggcggcgcgaattgatgacgctaaaccggtgctgattgtcagcgctgatgccggagcgcgcggtggcaaaatcattccctataaaaaattgctcgacgatgcgataagtcaggcgcagcaccagccacgccatgttttgctggtggatcgcgggctggcgaaaatggcgcgcgtcagcgggcgggatgtcgatttcgcgagcttgcgccatcaacacatcggcgcgcgggtaccggtggcgtggctggaatccaacgaaacctcctgcattctctacacttccggcacgaccggcaaacctaaaggcgtgcagcgtgacgtcggcggatatgcggtggcgctggcgaccagcatggacaccatttttggcggcaaagcgggcagcgtgttcttttgcgcaagcgatatcggctgggtggtggggcatagctatatcgtttacgcgccgctgctggcggggatggcgactatcgtttacgaaggattgccgacctggccggactgcggcgtgtggtggacaatcgtcgagaaatatcaggttagccggatgttcagtgcgccgaccgccattcgcgtgctgaaaaaattccctaccgctgaaattcgcaaacacgatctcagcagcctggaagtgctctatctggctggagaaccgctggacgagccgaccgccagttgggtgagcaatacgctggatgtgccggtcatcgacaactactggcagaccgaatccggctggccgattatggcgattgctcgcggtctggacgacaggccgacgcgtctgggaagccccggtgtgccgatgtatggctataacgtgcagttgcttaatgaagtcaccggcgaaccgtgtggcgtcaacgagaaagggatgctggtggtggaagggccgctgccgccggggtgtattcagaccatctggggcgacgacggccgctttgtgaagacttactggagcctgttttcccgcccggtgtacgccacctttgactggggcatccgtgacgctgacggttatcactttattctcgggcgcactgacgatgtaattaacgttgccgggcatcggctggggacgcgcgagattgaagagagtatctccagccatccgggcgttgccgaagtggcggtggttggggtgaaagatgcgctgaaagggcaggtggcggtggcgtttgtcattccgaaagagagcgacagtctggaagatcgtgatgtggcgcacagccaagagaaggcgattatggcgctggtggacagccagattggcaactttggccgcccggcgcacgtctggtttgtcagccaattgccaaaaacgcgatccggaaaaatgctgcgccgcacgatccaggcgatttgcgaaggacgcgatcctggagatctgacgaccattgatgatcctgcgagcttggatcagatccgccaggcgatggaagagtaagttattgtcggatgcgtcgcgcggtgcatccggcactgtgtgccgatgcctgatgcgacgctgacgcgttttatcatgcctacggacctgaaccgtaggtcggataaggcgctcgcgtcgcatccgacaccatgctcagatgcctgatgcgacgctgacgcgtcttatcaggcctacccactgtttttacaccgataatttttcccccacctttttgcactcattcatataaaaaatatatttccccacgaaaacgattgctttttatcttcagatgaatagaatgcggcggattttttgggtttcaaacagcaaaaagggggaatttcgtgagccaagataacaactttagccaggggccagtcccgcagagcgcgcggaaaggggtattggcattgacgttcgtcatgctgggattaaccttcttttccgccagtatgtggaccggcggcactctcggaaccggtcttagctatcatgatttcttcctcgcagttctcatcggtaatcttctcctcggtatttacactagttttctcggttacattggcgcaaaaaccggcctgaccactcatcttcttgctcgcttcagctttggtgttaaaggcagttggctgcctagtctgctactgggcggaactcaggttggctggtttggcgtcggtgtggcgatgtttgccattccggtgggtaaggcaaccgggctggatattaatttgctgattgccgtttccggtttactgatgaccgtcaccgtcttttttggcattagcgcgctgacggttcttagcgtgattgcggttccggctatcgcctgcctgggcggttattccgtgtggctggctgttaacggcatgggcggcctggacgcattaaaagcggtcgttcccgcacaaccgttagatttcaatgtcgcgctggcgctggttgtggggagttttatcagtgcgggtacgctcaccgctgactttgtccggtttggtcgcaatgccaaactggcggtgctggtggcgatggtggcctttttcctcggcaacagcttgatgtttattttcggtgcagcgggcgctgcggcactgggcatggcggatatctctgatgtgatgattgctcagggcctgctgctgcctgcgattgtggtgctggggctgaatatctggaccaccaacgataacgcactctatgcgagcggtttaggtttcgccaacattaccgggatgagcagcaaaacccttagcgtaatcaacggtattatcggtacggtctgcgcattatggctgtataacaattttgtcggctggttgaccttccttagcgcagctattcctccagtgggtggcgtgatcatcgccgactatctgatgaaccgtcgccgctatgagcactttgcgaccacgcgtatgatgagtgtcaattgggtggcgattctggcggtcgccttggggattgctgcaggccactggttaccgggaattgttccggtcaacgcggtattaggtggcgcgctgagctatctgatccttaacccgattttgaatcgtaaaacgacagcagcaatgacgcatgtggaggctaacagtgtcgaataactaagacgcatgtggaggctaacagtgagcaataacgctttacaaacaattattaacgcccggttaccaggcgaagaggggctgtggcagattcatctgcaggacggaaaaatcagcgccattgatgcgcaatccggcgtgatgcccataactgaaaacagcctggatgccgaacaaggtttagttataccgccgtttgtggagccacatattcacctggacaccacgcaaaccgccggacaaccgaactggaatcagtccggcacgctgtttgaaggcattgaacgctgggccgagcgcaaagcgttattaacccatgacgatgtgaaacaacgcgcatggcaaacgctgaaatggcagattgccaacggcattcagcatgtgcgtacccatgtcgatgttagcgatgcaacgctaactgcgctgaaagcaatgctggaagtgaagcaggaagtcgcgccgtggattgatctgcaaatcgtcgccttccctcaggaagggattttgagctatcccaacggtgaagcgttgctggaagaggcgttacgcttaggggcagatgtagtgggggcgattccgcattttgaatttacccgtgaatacggcgtggagagcctgcataaaaccttcgccctggcgcaaaaatacgaccgtctcatcgacgttcactgtgatgagatcgatgacgagcagagccgctttgtcgaaaccgttgctgccctggcgcaccatgaaggcatgggcgcgcgagtcaccgccagccacaccacggcaatgcactcctataacggggcgtataccagtcgcctgttccgcttgctgaaaatgtccggtattaactttgtcgccaacccgctggtcaatattcatctgcaaggacgtttcgatacgtatccaaaacgtcgcggcatcacgcgcgttaaagagatgctggagtccggcattaacgtctgctttggtcacgatgatgtcttcgatccgtggtatccgctgggaacggcgaatatgctgcaagtgctgcatatggggctgcatgtttgccagttgatgggctacgggcagattaacgatggcctgaatttaatcacccaccacagcgcaaggacgttgaatttgcaggattacggcattgccgccggaaacagcgccaacctgattatcctgccggctgaaaatgggtttgatgcgctgcgccgtcaggttccggtacgttatagcgtacgtggcggcaaggtgattgccagcacacaaccggcacaaaccaccgtatatctggagcagccagaagccatcgattacaaacgttgaacgactgggttacagcgagcttagtttatgccggatgcggcgtgaacgccttatccggcctacgtagagcactgaactcgtaggcctgataagcgtagcgcatcaggcaattccagccgctgatctgtgtcagcggctaccgtgattcattcccgccaacaaccgcgcattcctccaacgccatgtgcaaaaatgccttcgcagcggctgtctgccagctgtagtttatgccggatgcggcgtgaacgccttatccggcctacgtagagcactgaactcgtaggcctgataagcgtagcgcatcaggcaattccagccgcagacctgtgtcagcggttaccgactttcatttccgccaacaaccgcgcatttatccaacgccatgtgcaaaaatgccttcgcggcggctgtctgccagctatttttccgccgcaacaaaaccgccgttctctccagtagtggcggggcaagagaaatagctttaagcccgtcatgttgtgtggcaatcgctgctggtaacaatgtggaaagggaagtgcggcgaatcagctccagaaccgcgctaatactgttcgcctcaatgaccacctgtggatgtagccccgctttctcgcagtagtggtcaatttgctctctggtggcaaattccgcgctgagcaggaccagtttttcatcatgcaagcgactcaacgccacctgttcatggacggccagcggatgatgttgcgccacgactaacgctaaactttctgtcagtaaaggaattgcctccagctccgggctatgcacaggcgcgaaggcaatcccaacgtccaactcgtcgcggcaaagcatatcctcgattttctcctggctcatttcctgtagctggagcgtgatgctgggatagcgcgcatagaaatccgccattaaggggccgataaagtagctcgtaaaggtgggggtgacggcgatacgcaggcttcctcgcgtcagatcggcaacatcatgaatcgcccgtttacccgcccccagttcctgtaacgcccggctggcgtactgtcgccagacttctcctgcatcagtgagacgaatcgttcgcccgctacggtcaaacagcggcacgcctaaactctcctctaactggcgaatctgctgggaaagcgcaggttgggagacgtgcaacgcactggcggcacgggtgaagctgccatgttcagccacggcaagaaaataattgatatgtcgagagagcattcgcaacctataagtaaatccaatggaactcatcataaatgagacttttaccttatgacaatcggcgagtagtctgcctctcattccagagacagacagaggttaacggtgaaagagattattgatggattccttaaattccagcgcgaggcatttccgaagcgggaagccttgtttaaacagctggcgacacagcaaagcccgcgcacactttttatctcctgctccgacagccgtctggtccctgagctggtgacgcaacgtgagcctggcgatctgttcgttattcgcaacgcgggcaatatcgtcccttcctacgggccggaacccggtggcgtttctgctagcgtggagtatgccgtcgctgcgcttcgggtatctgacattgtgatttgtggtcattccaactgtggcgcgatgaccgccattgccagctgtcagtgcatggaccatatgcctgccgtctcccactggctgcgttatgccgatagtgcccgcgtcgttaatgaggcgcgcccgcattccgatttaccgagtaaagctgcggcgatggtacgtgaaaacgtcattgctcagttggctaatttgcaaactcatccaagcgtgcgcctggcgctcgaagaggggcggatcgccctgcacggctgggtctacgacattgaaagcggcagcatcgcagcttttgacggcgcaacccgccagtttgtgccactggccgctaatcctcgcgtttgtgccataccgctacgccaaccgaccgcagcgtaaccttatttttaaaccatcaggagttccaccatgattcagagtcaaattaaccgcaatattcgtcttgatcttgccgatgccattttgctcagcaaagctaaaaaagatctcagttttgccgagattgccgacggcaccggtctggcagaagcctttgtaaccgcggctttgctgggtcagcaggcgcttcctgccgacgccgcccgcctggtcggggcgaagctggatctcgacgaagactccattctactgttgcagatgattccactgcgtggctgcattgatgaccgtattccaactgacccaacgatgtatcgtttctatgaaatgttgcaggtgtacggtacaaccctgaaagcgttggttcatgagaaatttggcgatggcattattagcgcgattaacttcaaactcgacgttaagaaagtggcggacccggaaggtggcgaacgtgcggtcatcaccttagatggtaaacatctgccgaccaaaccgttctgacagccatgcgcaaccatcaaaagacgttcacgatgctgctggtactggtgctgattggtcttaatatgcgaccactgctcacctccgtcgggccactgctaccgcaattgcgccaggcgagcggaatgagctttagcgtggctgccctgttgaccgctctgccggtggttaccatgggcgggctggcgctggccggaagctggcttcatcagcatgtcagcgaacgtcgcagtgtcgccatcagtctgttgctgattgccgtcggtgcattgatgcgtgagctttacccgcaaagtgcgctgctgcttagcagcgcactgcttggtggggtggggatcggcatcattcaggcggtgatgcctagcgtgattaaacggcggtttcagcagcgcacgccactggtgatggggctgtggtccgcggctctgatgggcggcggtgggcttggtgccgccataacgccctggttagttcaacatagcgaaacctggtatcaaacactcgcctggtgggcgctgcctgccgttgttgcgctctttgcctggtggtggcaaagcgcccgcgaggtcgcctcttcccacaagacaacaaccactccggttcgcgtggtattcactccccgcgcgtggacgctgggtgtttacttcggtctgattaacggcggttacgccagcctgattgcctggttacccgctttctatattgagattggtgccagcgcgcagtacagcggttccttactggcattgatgacgcttgggcaagccgcaggagctttgctgatgcctgctatggctcgccatcaggatcggcgcaaactgttaatgctggcgctggtgttacaactggtggggttctgcggctttatctggctgccgatgcaattgccggtattgtgggcgatggtgtgtgggttaggtctgggcggcgcgtttccgctctgtttgctgctggcgctcgatcactctgtgcaaccggctattgctggcaagctggtggcgtttatgcagggaatcggttttatcatcgccgggcttgccccgtggttttctggcgtgctgcgtagtatcagcggcaattacctgatggactgggcatttcatgcgctgtgcgtcgttgggctgatgatcataaccctgcgttttgcaccagtacgttttccgcagctgtgggtcaaagaggcatgatgcgacgcttgttcctgcgctttgttcatgccggatgcggctaatgtagatcgctgaacttgtaggcctgataagcgcagcgtatcaggcaatttttataatttaaacactgctttcaactttataatctttgaaataatagtgcttatcccggtcgtttatttcgcgaataacccgacaaggaacgccagccgccacgacgtttggtggaatgtcttttgtgacgatactacccgcgccaataacagaattatccccgatggtgacgcctggattaataaccacatgacttccgatccagacgttattgccaatcgttatcggaaaagagtacatctcgccgttttttctcaattcatggtgtacagggtgtcccgtaacggaaagagtaacgttgggtgcaatcagtacgttatcaccgattgttaccgtgtagtcatcgacaatggttaaattgaaatttgcataaaaattgcggcctatatggatgttggaaccgtaagagaaatagacaggcggttctacccaggcgttttcccctaccgtggcaaacatttctttaatcaggctttctcttttttcaacttcacttggatggctgtgattaaactcatacattaacgttttcccacgaagtcttttttccggtaagccttcgcacatatcggtaaatagcttgcctgctcttattctttcggtcattggcatgttcaatgcgatcactccgttatgatatgttggtcggataaggcgctcgcgccgcatccgacattgattgcttaagcgacttcattcacctgacgacgcagcagggaaagcgggccggggccgctaagcgtgaacacggaaattaaggtgaagcccagcgccaccagacccagcaccagataagcgccctggaaaccgatgctttcatacatattgcccgccagtacagacataaaaatcatcgccagttgcttaaagaagcagaaacagaccagataaatcgtcgcactaaaacgcacttcaaactggctggtaatatatttaaagcagcccaccagcaggaacggtacttcaaacatatgcagcgttttcagaataaccacttccagcgcactggtggcgaagctactgccaataatacgtacagacataatagtgccagccagcagcagggcgtttttcccaccgatgcgattaatgatcagtggcgcaaagaacataatgctggcgttaagtaattcgcccattgtcgttacgtagccaaatacccgcgtaccctgttcaccggtagcaaagaagctagtaaagaaattagcaaactgttggtcaaaaacatcgtaggtgcaggaaacgccaataacatacagactcaaaaaccacagttttggctgtctgaacagttccagtgccagcttaaggctaaatgcgctatggttggcacctaccgcattggcaaccgtggcagaagagggcgcatccgttttggcgaaaaagagtaaaacggcgaggatgagtgcacagccagagcccagccagaaaacaaactgattattgatggtgaacatgatgccgacaatgctggcacacagcgcccagccaacacagccaaacatccgcgcgcgaccaaattcgaaattactgcgacggctgactttctcaataaatgcctctactgctggcgcaccggcgttaaaacaaaagcctagataaataccaccaacaatgcttcctactaaaatgttgtattgtaacagtggcccgaagataaaaataaagaacggcgcaaacatcactaacatgccggtaataatccacagcaggtatttgcgcagcccgagtttgtcagaaagcagaccaaacagcggttggaataataggctgaacagagaaatagcggcaaaaataatacccgtatcacttttgctgatatggttgatgtcatgtagccaaatcgggaaaaacgggaagtaggctcccatgataaaaaagtaaaagaaaaagaataaaccgaacatccaaaagtttgtgttttttaaatagtacataatggatttccttacgcgaaatacgggcagacatggcctgcccggttattattatttttgacaccagaccaactggtaatggtagcgaccggcgctcagctggaattccgcgcttacactcgggctccaggagtcgtcgccaccaatccccatatggaaaccgtcgatattcagccatgtgccttcttccgcgtgcagcagatggcgatggctggtttccatcagttgctgttgactgtagcggctgatgttgaactggaagtcgccgcgccactggtgtgggccataattcaattcgcgcgtcccgcagcgcagaccgttttcgctcgggaagacgtacggggtatacatgtcactcaatggcagatcccagcggtcaaaacaggcggcagtaaggcggtcgggatagttttcttgcggccctaatccgagccagtttacccgctctgctacctgcgccagctggcagttcaggccaatccgcgccggatgcggtgtatcgctcgccacttcaacatcaacggtaatcgccatttgaccactaccatcaatccggtaggttttccggctgataaataaggttttcccctgatgctgccacgcgtgagcggtcgtaatcagcaccgcatcagcaagtgtatctgccgtgcactgcaacaacgctgcttcggcctggtaatggcccgccgccttccagcgttcgacccaggcgttagggtcaatgcgggtcgcttcacttacgccaatgtcgttatccagcggtgcacgggtgaactgatcgcgcagcggcgtcagcagttgttttttatcgccaatccacatctgactaagaaagccactctggcggttaaattgccaacgcttattacccagctcgatgcaaaaatccatttcgctggtggtcagatgcgggatggcgtgggacgcggcggggagcgtcacactgaggttttccgccagacgccactgctgccaggcgctgatgtgcccggcttcactccatgcggtcgcgttcggttgcactacgcgtactgtgagccagagttgcccggcgctctccggctgcggtagttcaggcagttcaatcaactgtttaccttgtggagcgacatccagaggcacttcaccgcttgccagcggcttaccatccagcgccaccatccagtgcaggagctcgttatcgctatgacggaacaggtattcgctggtcacttcgatggtttgcccggataaacggaactggaaaaactgctgctggtgttttgcttccgtcagcgctggatgcggcgtgcggtcggcaaagaccagaccgttcatacagaactggcgatcgttcggcgtatcgccaaaatcaccgccgtaagcgctccacgggttgccgttttcatcatatttaatcaggctctgatccacccagtcccagacgaagccgccctgtaaacggggatactgacgaaacgcctgccagtatttagcgaaaccgccaagactgttacccatcgcgtgggcgtattcgcaaaggatcagcgggcgcgtctctccaggtaggctaagccattttttgatggaccatttcggcacagccgggaagggctggtcttcatccacgcgcgcgtacatcgggcaaataatatcggtggccgtggtgtcggctccgccgccttcatactgcaccgggcgggaaggatcgacagatttgatccagcgatacagcgcgtcgtgattagcgccgtggccactttcattccccaggctccagatgatcacactcgggtgattacgatcgcgctgcaccattcgcgttacgcgttcgctcatcgccggtagccagcgcggatcatcggtcagacgattcattggcaccatgccgtgggtttcaatattggcttcatccaccacatacaggccgtagcggtcgcacagcgtgtaccacagcggatggttcggataatggctacagcgcacggcgttaaagttgttctgcttcatcagcaggatatcctgcaccatcgtctgctcatccatgacctgaccatgcagaggatgatgctcgtgacggttaacgcctcgaatcagcaacggcttgccgttcagcagcagcagaccattttcaatccgcacctcgcggaaaccgacatcgcaggcttctgcttcaatcagcgtgccgtcggcggtgtgcagttcaaccaccgcacgatagagattcgggatttcggcgctccacagtttcgggttttcgacgttcagacgtagtgtgacgcgatcggcataaccaccacgctcatcgataatttcaccgccgaaaggcgcggtgccgctggcgacctgcgtttcaccctgccataaagaaactgttacccgtaggtagtcacgcaactcgccgcacatctgaacttcagcctccagtacagcgcggctgaaatcatcattaaagcgagtggcaacatggaaatcgctgatttgtgtagtcggtttatgcagcaagctgacgtcacggaaaatgccgctcatccgccacatatcctgatcttccagataactgccgtcactccagcgcagcaccatcaccgcgaggcggttttctccggcgcgtaaaaatgcgctcaggtcaaattcagacggcaaacgactgtcctggccgtaaccgacccagcgcccgttgcaccacagatgaaacgcgctgttaacgccatcaaaaataattcgcgtctggccttcctgtagccagctttcatcaacattaaatgtgaggctgtaacaacccgtcggattctccgtgggaacaaacggcggattgaccgtaatgggataggtcacgttggtgtagatgggcgcatcgtaaccgtgcatctgccagttactggggacgacgacagtatcggcctcaggaagatcgcactccagccagctttccggcaccgcttctggtgccggaaaccaggcaaagcgccattcgccattcaggctgcgcaactgttgggaagggcgatcggtgcgggcctcttcgctattacgccagctggcgaaagggggatgtgctgcaaggcgattaagttgggtaacgccagggttttcccagtcacgacgttgtaaaacgacggccagactatccgtaatcatggtcatagctgtttcctgtgtgaaattgttatccgctcacaattccacacaacatacgagccggaagcataaagtgtaaagcctggggtgcctaatgagtgagctaactcacattaattgcgttgcgctcactgcccgctttccagtcgggaaacctgtcgtgccagctgcattaaactatcggccaacgcgcggggagaggcggtttgcgtattgggcgccagggtggtttttcttttcaccagactgacgggcaacagctgattgcccttcaccgcctggccctgagagagttgcagcaagcggtccacgctggtttgccccagcaggcgaaaatcctgtttgatggtggttaacggcgggatataacaactgctgtcttcggtatcgtcgtatcccactacgctgatatccgcaccaacgcgcagcccggactcggtaatggcgcgcattgcgcccagcgccatctgatcgttggcaaccagcatcgcagtgggaacgatgccctcattcagcatttgcatggtttgttgaaaaccggacatggcactccagtcgccttcccgttccgctatcggctgaatttgattgcgagtgagatatttatgccagccagccagacgcagacgcgcgctgacagaacttaatgggcccgctaacagcgcgatttgctggtgacccaatgcgaccagatgctccacgcccagtcgcgtaccgtcttcatgggagaaaataatactgttgatgggtgtctggtcagagacatcaagaaataacgccggaacattagtgcaggcagcttccacagcaatggcatcctggtcatccagcggatagttaatgatcagcccactgacgcgttgcgcgagaagattgtgcaccgccgctttacaggcttcgacgccgcttcgttctaccatgctcaccaccacgctggcacccagttgatcggcgcgagatttaatcgccgcgacaatttggctcggcgcgtgcagggccagactggaggtggcaacgccaatcagcaagctctgtttgcccgccagttgttgtgccacgcggttgggaatgtaattcagctccgccatcgccgcttccactttttcccgcgttttcgcagaaacgtggctggcctggttcaccacgcgggaaacggtctgataagagacaccggcatactctgcgacatcgtataacgttactggtttcacattcaccaccctgaattgactctcttccgggcgctatcatgccataccgcgaaaggttttgcgccattcgatggtgtcaacgtaaatgcatgccgcttcgccttccggccaccagaatagcctggctttcaaccccttcttcgatctgttttgctacccgttgtagcgccggaagatgcttttccgctgcctgttcaatggtcattgcgctcgccatatacaccagattcagacagccaatcacccgttgttcactgcgcagcggtacggcgatagaggcgatcttctcctcctgatcccagccgcggtagttctgtccgtaaccctctttgcgcgcgcgcgccagaatggcttccagctttaacggttcccgtgccagttgatagtcatcaccggggcgggaggctaacatttcgattaattccttgcggtcttgttccgggcaaaaggccagccaggtcaggccgctggcggttttcagaagcggcaaacgtcgcccgaccattgcccggtgaaaggataagcggctgaaacggtgagtggtttcgcgtaccaccattgcatcaacatccagcgtggacacatctgtcggccataccacttcgcgcaacagatcgcccagcagtggggccgccagtgcagaaatccactgttcgtcacgaaatccttcgcttaattgccgcactttgatggtcagtcgaaaactatcatcggaggggctacggcggacatatccctcttcctgcagcgtctccagcagtcgccgcacagtggtgcgatgcaggccgctgagttccgccagcagcccgacgctggcaccgccatcaagtttatttaacatatttaataacattagaccgcgggttaagccgcgcacggttttgtattccgtctgctcattgttctgcatattaatactcatttctatagttaaaacaacgtggtgcacctggtgcacattcgggcatgttttgattgtagcgctaaacacccttcctatactgagcgcacaataaaaaatcatttacatgtttttaacaaaataagttgcgctgtactgtgcgcgcaacgacattttgtccgagtcgtgaggtactgaaatggcaatacaacaccctgacatccagcctgctgttaaccatagcgttcaggtggcgatcgctggtgccggcccggttgggctgatgatggcgaactatctcggccagatgggcattgacgtgctggtggtggagaaactcgataagttgatcgactacccgcgtgcgattggtattgatgacgaggcgctgcgcaccatgcagagcgtcggcctggtcgatgatgttctgccgcacactacgccgtggcacgcgatgcgttttctcaccccgaaaggccgctgttttgctgatattcagccaatgaccgatgaatttggctggccgcgccgtaacgcctttattcagccgcaggtcgatgcggtgatgctggaaggggtgagccgttttccgaatgtgcgctgcttgttttcccgcgagctggaggccttcagtcagcaagatgacgaagtgaccttgcacctgaaaacggcagaagggcagcgggaaatagtcaaagcccagtggctggtagcctgtgacggtggagcaagttttgtccgtcgcactctgaatgtgccgtttgaaggtaaaactgcgccaaatcagtggattgtggtagatatcgccaacgatccgttaagtacgccgcatatctatttgtgttgcgatccggtgcgcccgtatgtttctgccgcgctgcctcatgcggtacgtcgctttgaatttatggtgatgccgggagaaaccgaagagcagctgcgtgagccgcaaaatatgcgcaagctgttaagcaaagtgctgcctaatccggacaatgttgaattgattcgccagcgtgtctacacccacaacgcgcgactggcgcaacgtttccgtattgatcgcgtactgctggcgggcgatgccgcgcacatcatgccggtatggcaggggcagggctataacagtggtatgcgcgacgcctttaacctcgcatggaaactggcgttggttatccaggggaaagcccgcgatgcgctgctcgatacctatcaacaagaacgtcgcgatcacgccaaagcgatgattgacctgtccgtgacggcgggcaacgtgctggctccgccgaaacgctggcagggtacgttacgtgacggcgtttcctggctgttgaattatctgccgccagtaaaacgctacttcctcgaaatgcgcttcaagccgatgccgcaatattacggcggtgcgctgatgcgtgagggcgaagcgaagcactctccggtcggcaagatgtttattcagccgaaagtcacgctggaaaacggcgacgtgacgctgctcgataacgcgatcggcgcgaacttcgcggtaattggctggggatgcaatccactgtgggggatgagcgacgagcaaatccagcagtggcgcgcgttgggcacacgcttcattcaggtggtgccggaagtgcaaattcataccgcacaggataaccacgacggcgtactacgcgtgggcgatacgcaaggtcgcctgcgtagctggttcgcgcaacacaatgctagcctggtggtgatgcgcccggatcgctttgttgccgccaccgccattccgcaaaccctgggcaagaccctgaataaactggcgagcgtgatgacgctgacccgccctgatgccgacgtttctgtcgaaaaggtagcctgatatgcacgcttatcttcactgtctttcccacagcccgctggtggggtatgtcgacccggcgcaagaggtgctcgatgaggtcaatggcgtgattgccagcgcccgcgagcgtattgcggcattctcccctgaactggtggtgctgtttgcgccagatcactacaacggctttttctatgacgtgatgccaccgttctgtttaggcgttggagcgacggcaattggtgatttcggcagtgcggcaggagagctgcccgtgcctgtggagctggcggaggcctgtgcgcatgccgtcatgaagagcgggatcgatcttgccgtttcttactgtatgcaggtggaccacgggttcgcccagccgctggagttcctgctcggtgggctggataaggtgccagttctgcctgtgttcatcaacggtgtcgccacgccgctgcccggtttccagcgtacccgcatgttgggtgaagccattggacgtttcaccagcactctcaataaacgcgtgctgttcctgggttccggtgggctttcccatcagccgccggtgcccgaactggcgaaagccgatgcccatatgcgcgaccgtctgttggggagcgggaaagatttacccgccagtgagcgcgaattgcgtcagcaacgggtgattagcgccgctgagaagtttgttgaggatcagagaacgctgcatccgctcaacccgatttgggataaccagttcatgactttgctggagcagggacgcatacaggaactggatgccgtcagtaacgaagagctttccgccattgccggaaagagcacacatgaaatcaaaacctgggtcgccgcttttgccgctatttctgcgtttggcaactggcgtagcgaagggcgttattaccgcccaatcccggagtggattgccggatttggcagcttaagcgccagaacagagaactgaatatgcaggagaagatgatgagttatcagccacaaaccgaagccgccaccagccgttttctgaatgtagaagaagcgggtaaaacgctgcgcatccattttaatgactgcggacaaggcgacgaaaccgttgtcctgctgcatggttccggcccgggtgctactggctgggcgaacttcagccgcaatatcgatccgctggtagaggcgggctatcgggtgatcctgctggattgtccgggttggggcaagagcgatagcgtcgttaatagtggtagccgaagcgatcttaatgcacgaatcctgaaaagcgtggtggatcaactggatatcgccaaaatccacctgctgggcaacagcatggggggccatagttctgtggcgttcacccttaaatggccggagcgcgtcggcaaactggtgctgatgggcggcggtacgggcggcatgagtttgtttacgccgatgccaaccgaaggtattaagcgactgaatcagctttatcgtcagccgactatcgaaaacctgaagctgatgatggatatcttcgtttttgataccagcgatttgaccgacgccctgtttgaagcgcgcctgaataatatgctgagccgccgcgatcacctggaaaacttcgttaagagcctggaagctaatccgaaacagttcccggattttggcccacgtctggcggaaatcaaagcgcaaaccctgattgtctgggggcgcaacgaccgctttgtgccgatggatgcgggtctgcgtctgctgtccggcattgccggttctgaactgcatatcttccgcgactgtggtcactgggcgcagtgggaacatgccgacgctttcaatcaactggtgctgaatttcctcgcacgcccttaaggaatggtcatgacgaagcatactcttgagcaactggcggcggatttacgccgcgccgcagagcagggcgaagcgattgcaccgctgcgcgatctgattggtatcgataacgctgaagcggcttacgccattcagcacataaatgtgcaacatgacgttgcgcaggggcgtcgcgtggtagggcgtaaagtgggcctgacacatccgaaagtgcaacaacaactgggcgttgatcaaccggattttgggacgttatttgccgacatgtgttatggcgataacgaaatcattcctttttcccgtgttctgcaaccccgcattgaagcggagatcgcactggtgttgaaccgcgatttgcccgcaaccgatatcaccttcgacgaattgtataacgccattgaatgggtacttccggcgctggaagtggtggggagccgcattcgcgactggagcattcagtttgtcgataccgtggcagataacgcctcctgtggggtgtatgtcatcggcggtccggcgcaacgtccggcggggttagacctgaaaaactgcgccatgaagatgacgcgtaataacgaagaggtttctagcgggcgcggcagcgaatgcctgggacatccgcttaatgcggccgtctggctggcacgcaaaatggccagtctgggtgaaccgctgcgcaccggagatatcattcttaccggggcattaggtccgatggtggcggtgaatgcgggcgatcgttttgaagcccatattgaaggcataggtagtgttgctgcgacatttagtagcgcagccccaaaaggaagtctgagttgagctaagccccaaaaggaagtctgtcatgagtaagcgtaaagtcgccattatcggttctggcaacattggtaccgatctgatgattaaaattttgcgtcacggtcagcatctggagatggcggtgatggttggcattgatcctcagtccgacggtctggcgcgcgccagacgtatgggcgtcgccaccacccatgaaggggtgatcggactgatgaacatgcctgaatttgctgatatcgacattgtatttgatgcgaccagcgccggtgctcatgtgaaaaacgatgccgctttacgcgaagcgaaaccggatattcgcttaattgacctgacgcctgctgccatcggcccttactgcgtgccggtggttaacctcgaggcgaacgtcgatcaactgaacgtcaacatggtcacctgcggcggccaggccaccattccaatggtggcggcagttagtcgcgtggcgcgtgttcattacgccgaaattatcgcttctatcgccagtaaatctgccggacctggcacgcgtgccaatatcgatgaatttacggaaaccacttcccgagccattgaagtggtgggcggcgcggcaaaagggaaggcgattattgtgcttaacccagcagagccaccgttgatgatgcgtgacacggtgtatgtattgagcgacgaagctagtcaagatgatatcgaagccagtatcaatgaaatggctgaggcggtgcaggcttacgtaccgggttatcgcctgaaacagcgcgtgcagtttgaagttatcccgcaggataaaccggtcaatttaccgggcgtggggcaattctccggactgaaaacagcggtctggctggaagtcgaaggcgcagcgcattatctgcctgcctatgcgggcaacctcgacattatgacttccagtgcgctggcgacagcggaaaaaatggcccagagtctggcgcgcaaggcaggagaagcggcatgaacggtaaaaaactttatatcagcgacgtcacattgcgtgacggtatgcacgccattcgtcatcagtatagcctggaaaacgttcgccagattgccaaagcactggacgatgcccgcgtggatagcattgaagtggcccacggcgacggtttgcaaggttccagctttaactatggtttcggcgcacatagcgaccttgaatggattgaagcggcggcggatgtggtgaagcacgccaaaatcgcgacgttgttgctgccaggaatcggcactattcacgatctgaaaaatgcctggcaggctggcgcgcgggtggttcgtgtggcaacgcactgtaccgaagctgatgtttccgcccagcatattcagtatgcccgcgagctcggaatggacaccgttggttttctgatgatgagccatatgaccacgccggagaatctcgccaagcaggcaaagctgatggaaggctacggtgcgacctgtatttatgtggtggattctggcggtgcgatgaacatgagcgatatccgtgaccgtttccgcgccctgaaagcagagctgaaaccagaaacgcaaactggcatgcacgctcaccataacctgagtcttggcgtggcgaactctatcgcggcggtggaagagggctgcgaccgaatcgacgccagcctcgcgggaatgggcgcgggcgcaggtaacgcaccgctggaagtgtttattgccgccgcggataaactgggctggcagcatgggaccgatctctatgcgttaatggatgccgccgacgacctggtgcgtccgttgcaggatcgaccggtacgagtcgatcgcgaaacgctggcgctgggatacgctggtgtttacagcagcttcctgcgtcactgtgaaacggcggcggcgcgttatggcttaagtgcggtggatattctcgttgagctgggcaaacgccggatggttggcggccaggaggatatgatcgttgacgtggcgctggatctgcgcaacaacaaataatgatgactgccgagaacgtgcattttgtatgcccatcccagcacgactgccggatgcggcgtgaacgccttatccggcctacggatggcgtgagaatttgtaggtctgataagacgcgttagcgtcgcatcaggcatctgcgcacgactgccggatgcggcgtgaacgccttatccggcctacggatggcgcgggaatttgtaggcctgataagacgcgttagcgtcgcatcaggcatctgcgcacgactgccggatgcggcgtgaacgccttatccggcctacgggtggcgcgagaatttgtaggcctgataagacgcgttagcgtcgcatcaggcatctgcgcacgactgccggatgcggcgtaaacgccttatccggcctacggatggcgcgggaatttgtaggcctgataagacgcgttagcgtcgcatcaggcatctgcacacgactgccggatgcgataaacgtcttgtccggcctacatttcgcccgtaggcagtcattaaatagttctgattacgcggctggcaatgtatcagtcgcgattcacctgcactcgcaacgaggttcatcttatgagcactcgtacccctagtagttctagttcccgcctgatgctgaccatcgggctttgttttttggtcgctctgatggaagggctggatcttcaggcggctggcattgcggcgggtggcatcgcccaggctttcgcactcgataaaatgcaaatgggctggatatttagcgccggaatactcggtttgctacccggcgcgttggttggcggaatgctggcggaccgttatggtcgcaagcgcattttgattggcagtgttgcgctgtttggtttgttcagtctggcaacggcgattgcctgggatttccccagtctggtctttgcgcggctgatgaccggtgtcgggctgggggcggcgttgccgaatcttatcgccctgacgtctgaagccgcgggtccacgttttcgtgggacggcagtgagcctgatgtattgcggtgttcccattggcgcggcgctggcggcgacactgggtttcgcgggggcaaacttagcatggcaaacggtgttttgggtaggtggtgtggtgccgttgattctggtgccgctattaatgcgctggctgccggagagcgcggttttcgctggcgaaaaacagtctgcgccaccactgcgtgccttatttgcgccagaaacggcaaccgcgacgctgctgctgtggttgtgttatttcttcactctgctggtggtctacatgttgatcaactggctaccgctacttttggtggagcaaggattccagccaagccaggcggcaggggtgatgtttgccctgcaaatgggggcggcaagcgggacgttaatgttgggcgcattgatggataagctgcgtccagtaaccatgagcctactgatttatagcggcatgttagctagcctgctggcgcttggaacggtgagcagttttaacggtatgttgctggcgggatttgtcgcggggttgtttgcgacaggtgggcaaagcgttttgtatgccctggcaccgttgttttacagtagccagatccgcgcaacaggtgtgggaacagccgtggcggtagggcgtctgggggctatgagcggtccgttactggccgggaaaatgctggcattaggcactggcacggtcggcgtaatggccgcttctgcaccgggtattcttgttgctgggttggcggtgtttattttgatgagccggagaagtcgaatacagccgtgcgccgatgcctgacgtgccttattaggcaggggcgaaagggacttcaccccaatacacctacggcgtttacaggtatactcgctaaaaattattcagcgggtttggaaacaaagatggcaaaacttaccttacaagagcagttgctcaaagcaggattagtcaccagcaaaaaagcggcgaaggtggagagaacggcgaaaaaaagccgcgttcaggcgcgtgaagctcgggcggcggtagaagaaaataaaaaggcacagcttgagcgtgataaacagcttagcgaacagcaaaaacaagcggcgttggcgaaagaatataaagctcaggtgaagcagcttattgaaatgaaccgaatcaccattgccaatggcgatattggttttaacttcactgacggcaatctgattaagaagatttttgtcgataagctcacacaggcgcagttgattaatggtcgtctggcgattgcccgcttgttggtcgataacaatagcgaaggtgaatacgccattattcccgccagcgttgccgataaaattgctcagcgcgatgccagcagtatagtgttgcacagcgcgctcagcgccgaagagcaggatgaagacgacccgtatgccgacttcaaagtgcctgatgatttgatgtggtaaacatagataagtcgtgcgcagatgcctgatgcgacgctatgcgcgtcttatcaggcctacggtttatgggcgaagtgtagaccggataaggcgttcacgccgcatccggcagtcgtgcgccatgcctgatgcgacgctttgcgcgtcttatcaggcctacggcttacgggcgaagtgtaggccggataaggcgttcacgccgcatccggcagtcgtgctattatcaacgcatattcagtttattggcgtggtaggcaatatgctcgccaataaaactggagacaaaataatagctgtgatcataaccctcgtgataacggattaacgtcttgatattcatctcctggcagatcttttcaagatttggagtccgcagctgttctgcgtaaaaatcatcactcaacccctgatcaaccatgatttccgcaacgcgttgaccttgactaataagactcaccgggtcgtaatccaaccaggcatctttattttcagcaagatatgcagcaaaggcttgctgtccccacggcacttggcttggggagacaatggggctaaacgcgctgacgctgacatattcatctgggttacgtaacgccagcaccagcgcgcccagcccgcccatagaatgaccagagatagactttttggccgttgccggaaaatgatgcatcactaaatccggcagctcgttgcggatatagtcatacattttgtaatgttcattccacggcgcttgcgtcgcgttcaggtaaaacccggcaccttgcccgagatcgtaacggtcagcatctgcgacatgactgcctcgcggactggtgtccggcgcaacaacaataatgttgtgctcagccgcgtaacgctgcatcccgcttttagtaatgaaattctgctcgttgcaggtcaggccactaagccagtacagcaccggcaatttttcattcgcggcttttggtgggagatagacgccgacattcatttcacatttcagactttgggaataatgccgatacatattttgccagccgccaaagctgacatgtttttcaatgagttccatcagtcattatctcagggttaatcccccggacggctgcccggggagagtattaagaacccccgcctgaagtggacggggtaaacctgcgggaaatcagtaacgaattacggttcgaatggatttgccttcatgcatcaggtcgaaggcgtcattaatttcatccaggctcatggtatgcgtgacaaacggttccagatcgatatcacctttcatcgcatcttcaaccatgcccggtaactgggaacgacctttcacgccgccaaacgcggaacctttccatacgcgaccagtgaccaactggaatggacgggtggagatttcctgaccggcaaccgcgaccccgatgatcacgctctgaccccagccgcggtgcgcactttccagcgccgcacgcatcacgttgacgttaccgatgcattcaaaggtatggtcgataccccatttgttgatatccaacaggacatcttttatcggtttgtcgtagtcattcgggttaatgcagtcggtagcaccgaagcgacgcgccagatcgaatttcttcgggttggtatcgatagcgataatccgacccgctttcgcctgacgcgcgccctgaaccactgccagaccaatcgcgccaagaccaaacacggcaacagaatcacctggctggactttagctgtgttgtgtaccgcgccaataccggtggtcacgccacagcccagcaggcagacgtgttcatggtttgcttctggattaatttttgccagagacacttccgcgactacggtgtattcactgaatgtagagcaccccatgtagtgataaagcggctgcccgttgtaagaaaaacgggtggtgccgtctggcatcaggcctttaccctgggtttcgcgaaccgcaacacagaggttagttttgccagaacgacagaactcacactcgccgcactccgcggtgtaaagcgggatcacatggtcgccaggtttgacgctggttacgccttcaccgacttcaaccacaacgccggccccttcgtgaccgagaaccaccgggaatacaccttccgggtcatcgccggagagggtaaatgcgtcggtatggcaaacgccggtatgggtgactttaattagcacttcaccttttttcggtggtgcaacgtcaatttcaacgatttccagcggtttaccgggagcaaatgcaacggcagcacgacttttcatctctcgctcttcctcaatatggtaatagattcagttatttaagataggcacgaaccagttcaatagtgtcgtcaacggattggctgacttcgcggctgtagcagtcatttcggtcaaacgtttcccggatatggctttcaagcacttctgccatcagcccattagccgcgccccgaacggcagcgatctgttggagtatggcacggcattcggcatcaccctccaggctccgttccagagcatcaatctgcccccgaatacgacgaactcgagtaaggacctttttcttctcttccggagtactgggcatttcgcacctcatcatctgcatgcaatatactataggggggtattctatatgtcaatgcatacccccctatagtatataacactggagaataaaatttatccggtgaatgtggtcggaaaacaaagaggaaaggggggggggctaatcggcagggaaggccgccccggatagcgggcggcagaaggaatcagaatttccaggtcagacgggctgcaagttgcagaccgttacgagatggacggtcccctcgcccccttggggagagggttagggtgagggggcgttcaccgtactttcaacaggttaactccccctttctgagaggaaacaaaattaacgcagaatcttcttctcagccaaatccagcgcaaagtagctgaaaatcagatccgcacccgcacgcttaatgctacctaagctttcgagcacgactttctcttcatctatagcacccgccagcgcggcgaacttaatcatcgcatactcaccgctcacctgatacgcgccaatcggcaattcagtacgttcacgcagctcacgcacgatgtcgaggtacgctccagcaggtttaaccatcaggcagtctgcgccctgggcttcatccagcagactttcacgaatcgcctcacgacggttcattgggttcatctgatagcttttgcggtcgccttttaatgcgcttccggcagcttcacggaacgggccataaaaggaggaggcgaacttggtgctatagctcataatcgccgtatctttaaatcccgcagcgtccagcgcctgacgaatcgcctgtacctggccgtccatcgcggcggaaggggcgatgaagtctgcacctgcagcagctgcaaccacggcttgcttgcctaaattttccagagtcgcgtcgttgtcgacgccatgctcgcacagcacaccgcagtgaccgtgagaagtgtattcacagaagcaggtgtcactcataacgatcatttctggcacggtctgcttgcagatgcggctcatacgcgccaccagtccatcttcccgccaggcatcgctgccggtttcatcggtatggtgagagatgccaaaagtcatcacggaacgaataccggcgttggcgatgcgttcaatttcgcgtgccagatgtttctctggaatgcgcatcacgcctggcatggcttcaacggctttgtagtcgtcaatttcttcttcaacaaagatcggcaacaccaggtcgttaaggctaagtgttgtctcttcaaacatagcgcgcagcgcaggagatttgcgcaggcgacgagggcgttggattaagtctgtcatggtctgcctgatgtttgtggaatcgaggggcatagtatacctgaagcagggtagggatgttttacgaaagttgtcgcgatgttgacaagaagagaatggaagagaggccaggacatctttttaatagaaacagcaataattttatattcactgaaaatatttttaatcttgaatattatcgggcgttaaaatattacattgtggttttcaatgcgttatccgcagcgtgacgctccagcgccagttcaatcaaacgtgtgatcagatcggtgtaacccagaccgctggcttgccacagcttcggatacatactgatattagtgaagccaggcagggtgttgatctcgttgatcaccacttcgttctctggggttaaaaacacgtctacacgcgccatgcctgcgcatcccaacgtttgataagcctgaacggcaatcgcccggatcttatcgttgatttctggcgcaatggctgccggaactaccactttcgcgccatcttcgtcaatgtacttggtgtcgtaggcatagaaatcgctggtgagtacgatctctccacaggtgctggcttgcggattgtcgttgcccagaactgcgcattcgatctcacgacctttgatcccttgctcaacgatcactttatgatcgaactcgaacgccagatcgacggcaattgcgtactgttcttcactggttactttgctgacaccaacagaagagccctgattagccggttttacaaacagtggtaaccccagtttagactccacttcggcaaaactaatgttgtgacgattggcgcgcgtcagggtaataaatggcgcaatgttcagcccggcatcgcgtagcagacgtttggtgacatctttgtccatacaggctgcactagccagaacatcagaacctacaaacggtaaattggcgacccgcagcattccctgcaaggaaccatcttcgcccagcgtaccgtggacaatcgggaaaatgacatccaccgtcggcaacggctgaccgttttgcgcgtcgataagctgatgctcatgtttacctggcacctgcgcaaggctggtcgcgctagggcgcaacgcaatatgggcaggatcgtctgcatttagcagataattgctggcatcgctgacgtgccattgcccttgtttatcaatgcccagcagcacaacgtcgaagcgacttttatcaatggcatcgacaatgttttttgcgctttgcagagacacttcatgttccgcacttttaccaccaaaaacgattcctacccgcagtttttccatcttaaaaacctatcccgtctaacacaaagtgcatacattaccacgacaaaacgggggattcgcggccttctgaaagattgttgcaatcttctgctgacaaagcgtgcaacgtactggtgaagaaagtgcgttatctcaaagatgtgcgcaagatcacaaaaatgatgaacgggaagctaatttattcctggcttaaatggccatgcggtgagtttttttctcttaattataagttaacgaagagaatatatttcataacttttatttataataaaggttgataattaaaagcctatattttgtgtgggtaattatttaaataagagaaacgtttcgctggtaatcaaacaaaaaatatttgcgcaaagtatttcctttgtcataaaaataatacttccagacactatgaagttgtgaaacataatgttaacttctccatactttggataaggaaatacagacatgaaaaatctcattgctgagttgttatttaagcttgcccaaaaagaagaagagagcaaagaactgtgtgcgcaggtagaagctttggagattatcgtcactgcaatgcttcgcaatatggcgcaaaatgaccaacagcggttgattgatcaggtagagggggcgctgtacgaggtaaagcccgatgccagcattcctgacgacgatacggagctgctgcgcgattacgtaaagaagttattgaagcatcctcgtcagtaaaaagttaatcttttcaacagctgtcataaagttgtcacggccgagacttatagtcgctttgtttttattttttaatgtatttgtacatggagaaaataaagtgaaacaaagcactattgcactggcactcttaccgttactgtttacccctgtgacaaaagcccggacaccagaaatgcctgttctggaaaaccgggctgctcagggcgatattactgcacccggcggtgctcgccgtttaacgggtgatcagactgccgctctgcgtgattctcttagcgataaacctgcaaaaaatattattttgctgattggcgatgggatgggggacagcgaaattactgccgcacgtaattatgccgaaggtgcgggcggcttttttaaaggtatagatgccttaccgcttaccgggcaatacactcactatgcgctgaataaaaaaaccggcaaaccggactacgtcaccgacagcgctgcaagtgcaaccgcctggagtaccggtgtcaaaacctataacggcgcgctgggcgtcgatattcacgaaaaagatcacccaacgattctggaaatggcaaaagccgcaggtctggcgaccggtaacgtttctaccgcagagttgcaggatgccacgcccgctgcgctggtggcacatgtgaccagccgcaaatgctacggtccgagcgcgaccagtgaaaaatgtccgggtaacgctctggaaaaaggcggaaaaggaagcattaccgaacagctgcttaacgctcgtgccgacgttacgcttggcggcggcgcaaaaacctttgctgaaacggcaaccgctggtgaatggcagggaaaaacgctgcgtgaacaggcacaggcgcgtggttatcagttggtgagcgatgctgccagtctgaatagcgtgacggaagcgaatcagcaaaaacccctgcttggcctgtttgctgacggcaatatgccagtgcgctggctaggaccgaaagcaacgtaccatggcaatatcgataagcccgcagtcacctgtacgccaaatccgcaacgtaatgacagtgtaccaaccctggcgcagatgaccgacaaagccattgaattgttgagtaaaaatgagaaaggctttttcctgcaagttgaaggtgcgagtatcgataaacaggatcatgctgcgaatccttgtgggcaaattggcgagacggtcgatctcgatgaagccgtacaacgggcgctggaattcgctaaaaaggagggtaacacgctggtcatagtcaccgctgatcacgcccacgccagccagattgttgcgccggataccaaagctccgggcctcacccaggcgctaaataccaaagatggcgcagtgatggtgatgagttacgggaactccgaagaggatagtcaagaacataccggcagtcagttgcgtattgcggcgtatggcccgcatgccgccaatgttgttggactgaccgaccagaccgatctcttctacaccatgaaagccgctctggggctgaaataaaaccgcgcccggcagtgaattttcgctgccgggtggtttttttgctgttagcaaccagacttaatggcagatcacgggcgcatacgctcatggttaaaacatgaagagggatggtgctatgaaaataacattactggttaccttgcttttcggtctggtttttttaaccaccgtcggcgctgccgagagaactttaaccccacaacaacagcgtatgacctcctgtaatcagcaggcgacggcgcaggcgttgaaaggggatgctcgtaagacctacatgagtgattgcctgaagaacagcaagtctgcgcctggcgaaaaaagtttgacgccacagcagcaaaagatgcgcgaatgcaataatcaagcaacacaacaatctctgaaaggtgatgatcgtaataagtttatgagtgcctgcctcaagaaagccgcctgatacctgatagtgctaacgggtgagctacgaaaatggctcacccgaaatatcatacttctgcctttagctccgtctctataatttgggaaaattgtttctgaatgttcccaaaaataatgaatgatgaaaactttttcaaaaaagcggcggcgcacggggaggaacctcctttaactcctcaaaacgaacatcagcggtccgggctgcgcttcgcccgtcgcgtcagactaccccgtgcggttggcctggctggcatgttcttaccgattgctagtacgctggttagtcacccgccgccgggctggtggtggctggtgttggtcggctgggcgttcgtctggccgcatttagcctggcagatagcgagcagggccgtcgatccgcttagccgggaaatttacaacttaaaaaccgatgcagtattagcgggaatgtgggtaggcgtaatgggcgtaaacgtgctgccttccaccgcgatgttgatgattatgtgtctgaatttgatgggggcaggcggcccccgtctgtttgtcgcgggtctggtgttgatggtggtttcctgccttgtcaccctcgagctgacgggcattaccgtgagcttcaatagtgcgccgctggaatggtggctctcccttcccattattgtcatttatcctctgctgtttggctgggtcagctaccagacggcaaccaaactggcggaacataaacgcaggttgcaggtcatgagtacccgcgacggcatgacgggcgtgtataaccgacgtcattgggaaactatgttacgcaatgaatttgataactgtcggcggcataatcgcgatgcaacgttactgattatcgatatcgaccatttcaagagcatcaacgatacctggggccatgatgtgggcgatgaagcgattgtggcgcttacccgacagttacaaattgccctgcgcggtagcgatgtgattggtcggtttggcggcgatgagtttgcagtaatcatgtccggtacgccagctgagagcgccattaccgccatgttacgggtgcatgaagggctaaatacattacgtttgccgaatacgccacaggtaactttacggattagtgtgggggttgcgccgctgaacccacaaatgagtcactatcgtgagtggttgaaaagcgcagatttggcgctttacaaagcaaagaaagccggacgtaaccgcaccgaagtggcggcctgacgtccggcgaaagtcatcaggatttgctgagtttttcacttttttccatacacttcgtcatcgcttcgatcactgcagcacggaagcctttctcttccagtacgcgtaccgcttcaatggtggtgcctcccggactgcagaccatatctttcagtgcccccggatgttctcccgtttccagcaccatttttgcggaacccattaccgcctgagcggcaaatttatacgcctgggcgcgtggcatcccgcccagcacggcggcgtcggccatcgcttcgataaacataaatacgtaggctgggctagaaccgctcacaccgaccaccgggtggatcatcggctcagcaattacttccgcttcgccaaagcagcggaaaatattcagcacatcagcggtatcttctggggttaccagcgcgtttggcgttacggaggtcatcccggcattaaccagtgcgggagtgttcggcatggcgcggataattttccggtcatggcccagcgcgcgggcaagctggtcgagcgtgacacctgcagcaatagaaacgaccagagagtctttattcaggctggaggtgatttcgctaagcactttaatcatgatgccaggtttaacggcagcaaaaatgatgtcggcgatttgcgccacttcttgcgcgctttctgcggcgttgatgccgaactggtcatgcagggcggcgactttatccggggagggggtgtatacccagatttgccctggaagcacctgaccgctggcaatcagaccgccgagaatggcttttcccatattgccgcagccaataaaaccgattttcttttccattgcctcactcctgccgtgaaattcattgttttgataatcgctggcagaagcataaacagaactatgccggaaggcaaaagcgcgacacaatagaggattacccaacaaaggatgactttatgacaatttgggtggatgccgacgcgtgtcccaatgtaattaaagagattttgtatcgcgcggcggaacgtatgcagatgccgctggtactggtagcaaaccagagtttacgcgtgccgccaagccgatttattcgtacgctgcgcgtcgcggcaggtttcgacgttgccgataacgaaattgtccggcagtgtgaagcgggcgatttggtgatcaccgcagatatacctttggctgctgaagccatcgagaaaggcgctgcggcgcttaatccgcgcggcgaacgttacacgccagcgaccattcgtgagcgcctgacgatgcgcgattttatggataccttacgtgccagtgggatccagaccggcggaccagatagccttagtcaacgtgaccgccaggcctttgccgcggagctggagaagtggtggctggaagtgcaacgtagtcgtggctaaatgtaatttattatttacacttcattcttgaatatttattggtatagtaaggggtgtattgagattttcactttaagtggaattttttctttacaatcgaaattgtactagtttgatggtatgatcgctattctcatgacaccggctttcgccgcattgcgacctattggggaaaacccacgatgacacaacctctttttctgatcgggcctcggggctgtggtaaaacaacggtcggaatggcccttgccgatagccttaaccgtcggtttgtcgataccgatcagtggttgcaaagtcagctcaatatgacggtcgcggagatcgtcgaaagggaagagtgggcgggatttcgcgccagagaaacggcggcgctggaagcggtaactgcgccatccaccgttatcgctacaggcggcggcattattctgacggaatttaatcgtcacttcatgcaaaataacgggatcgtggtttatttgtgtgcgccagtaagtgtcctggttaaccgactgcaagctgcaccggaagaagatttacggccaaccttaacgggaaaaccgctgagcgaagaagttcaggaagtgctggaagaacgcgatgcgctatatcgcgaagttgcgcatattatcatcgacgcaacaaacgaacccagccaggtgatttctgaaattcgcagcgccctggcacagacgatcaattgttgattttcgagcgcctatacttaacgttcatcccgtgaaataaggaagaacgatgccaacgaaaccgccttatcctcgtgaagcatatatagtgacgattgaaaaaggaaagccaggacagacggtaacctggtaccaactcagagccgatcatcctaaaccagacagcttgatcagtgaacatccgaccgctcaggaagcgatggatgcgaaaaaacgctatgaggaccctgacaaagagtgaccgcatcagactgctcggaagggattctgagtgccactacaagggatctgcgtcacatttttcataattcatgtttttctaataattagaatattaaacaataacaatccattactggaatcatttggaatctttacattatgccgtgcacgtctgctgctacgctttttgtcatttgtagcacaagtaagtgtcagcagtggtgcttcacacttgcccggtaattaacgacgaaagaaaagtaaggtggatgaacaatgagtgcgagcttggcgatcctgaccatcggcattgtacctatgcaggaagttttgccgctcctgacggaatacattgacgaagataatatttcccatcatagcctgctggggaagttaagtcgtgaagaagtgatggcggagtacgcgccagaagcaggcgaagacaccattctcacattattaaatgacaaccagctggcccatgttagccgtcgcaaagtggagcgtgacctgcaaggtgtggttgaagtgctcgataatcagggttatgacgtcattttattaatgagtacagcaaacattagtagtatgactgcgcgtaatacgatctttcttgagccgagccgaatattgcctccactggtttcctctattgttgaagatcatcaggtgggggttatcgttccggttgaggagatgctgcccgttcaggcgcaaaaatggcaaattttgcagaaaagcccggtatttagtttgggtaaccccattcatgatagtgaacaaaaaatcattgatgccgggaaagaattactggcaaaaggggctgatgtcatcatgctggattgtttaggatttcaccaacgtcatcgcgatttactgcaaaaacagctcgatgttcctgtcttgctgtctaacgtattgattgcacggctggctgcggaattactggtgtaattttgcgtgacagccagcgcctctggcccctatagtgaagtagatgttcaactaccaaacagggccagtttatgcttcaaagtaatgagtacttttccggcaaagtgaaaagtatcggcttttccagcagcagcactggtcgcgccagcgtgggtgttatggttgaaggcgaatacaccttcagcaccgctgagccggaagagatgacggtaatcagtggcgcgctgaatgtgttactgcctgacgcgaccgactggcaggtgtatgaagccggtagcgtgtttaatgttcccggtcacagtgagtttcatctgcaagttgccgaacccacctcttatctgtgccgctatctgtaattcctcgccttccccttgaacgggagggcatttttctgaaatatcctttctttagcccataataatatttcctttgctgcgattttttcaatttccgatatattcataatttatcaaggttgatataaatatcagtgaagatctccagatattgttgcggaactggctacgataaaagataaatcagatgatgaatggtggcgtgcattgctgcaaagtcgcaatgatcatttacgccaaacggcattgcgcaacgcacataccccggcgttgttgttaacgacattgactgagcctcaggatcggagcctggctattaataatccacagctggctgccgatgtgaaaacggcgtggttaaaagaggatccaagtttactcttatttgtcgaacaacccgatcttagcctgttacgtgatttagtgaaaaccggggcaacgcggaaaattcgcagtgaagcgcgtcaccggcttgaggaaaaacaatgacacaacgtccatggagcaagttacagcgtaaaacgcataatattgctgcgctaaaaattattgctcgccgtagcgaataattatatgcctggtgtggcttcgtacgccggataagacgcggcaggcgtcgcatccggcattaaaggaaaatcagcaattaacgttgtgcttcgccacctaatccttcaatcaggttttgaattaacgctgccagttcaccagtcatcaggatgaaatcggcatcaaaacgctgggcgaaatcttcacggtcgatatcttcgttttgatcgcgcagctcgtcgcagaacttcagacgcttgaggctaccatcgtcgcacatcacaaactgaatgcgctgctgccagtcgagcgccagtttagtcaccacttttccggcttcaatgtgattggtgatctcttcgctggtcagatcttgtttcttcgcgcggatcacgccgccatcttccagcaagcttttcagctcggcttcatcaagcagctggaagccctgtgccgcactaccggagcgaacccattcggtcagcgtcagttcaatcgggttttccatgctcaatggtacaaccggtaagctccccaggcttttacgcagtaatgccagcgtatcttccgcttttttggcactggcgcagtccaccataatcaaaccgttaaccgtgtcgatccacatcattgtctggctaaaacggctgaaagcacgcggcagcagagagtgcagcacttcgtctttcaggctatctttttcggttttcttcagcttacgcgcctgttccgcttccagtttggcgattttcgcttccagcgcctgtttaatcaccggagacgggaggattttttcttctttgcgcgcgcagataacaatttgaccattggcaacgtgcgttaacgcatcgctgtggcttcccatcggaggaacccagcccatcttcgccatgtcctggctgccgcatggggtaaatgccatgctggctagctgtttttccatctcttctgcacgcaggctaatctcgcggctaagacggtaaaccattaaatttttgaaccacagcatgataatttccacggccttgtcgttaaatttagcgggcatgataacgaattgtcggcggccttgcattgccaatccggttgtccgtctctacgctattgatattgaaaaaaataaggagagtaccgtgcgtataggtatcgatttaggcggcaccaaaactgaagtgattgcactgggcgatgcaggggagcagttgtaccgccatcgtctgcccacgccgcgtgatgattaccggcagactattgaaacgatcgccacgttggttgatatggcggagcaggcgacggggcagcgcggaacggtaggtatgggcattcctggcagtattagcccttacaccggtgtggtgaagaatgccaatagtacctggctcaacggtcagccattcgataaagacttaagcgcgaggttgcagcgggaagtgcggctggcaaatgacgctaactgtctggcggttagtgaagcagtagatggcgcggcagcgggagcgcagacggtatttgccgtgattatcggcacgggatgcggcgcgggcgtggcattcaatgggcgggcgcatatcggcggcaatggcacggcaggtgagtggggacacaatccgctaccgtggatggacgaagacgaactgcgttatcgcgaggaagtcccttgttattgcggtaaacaaggttgtattgaaacctttattagcggcacgggattcgcgatggattatcgtcgtttgagcggacatgcgctgaaaggcagtgaaattatccgcctggttgaagaaagcgatccggtagcggaactggcattgcgtcgctacgagctgcggctggcaaaaagcctggcacatgtcgtgaatattctcgatccggatgtgattgtcctggggggcgggatgagcaatgtagaccgtttatatcaaacggttgggcagttgattaaacaatttgtcttcggcggcgaatgtgaaacgccggtgcgtaaggcgaagcacggtgattccagcggcgtacgcggcgctgcgtggttatggccacaagagtaaaaaacgtaggcaattggcgcatcatgcctgatgcgacgcttgccgcgtcttatcaggcctacaaaaggtgccagaaccgtaggccggataaggcgttcacgccgcatccggcaataagtgctccgatgcctgatgcgacgcttgccgcgtcttatcaggcctgcaaaatgtgccagaaccgcgtagggcggataaggcgttcacgccgcatccggcaataagtaatgagcaccgagactataacttaccccagtggtttcgccagcaccggagtatccgccgcttgctggcgcttatagcgaccatacagcagcaagctgctcatcgcagcaaagctaagcagggcggcaggcagcgccacgtaattatatgccagccccagcgtcagcatcatacctccgcaatatgcgccgacggcgctaccgaggttaaacgctatttgcccacctgcggcacctaataactctccgcctttggcgttttgtagtaacaatatttgtagcggtgcactaagggcaaataatcccgcgcaacaaataaaagcaaaaataaggctcgttgttttcatgccgccgcagaaaaagagcatcagcagtgccagtacaattataaagtcagttactgctgcaatgcgcagtggactataacgtccactaatcctgccacttagcatatttcccagcaccatccctagcccaactaacatcataataaaggtcatcgccgtttcgctaaaaccggaaataaacatcatgtatggctttacgtagctgaaccaggcaaacacacctgcgttgccaaacatcgtggcggcgaaaattaaccacggggccgggctgcgcaaaaagtgaaattgttcgcgcagatttcctttcgcctcgtcgcgaatatctggcacccaaaaatagacgcttgccatcaccgcaatattaaaaacagcgatcaataaaaaggtgtaacgccagctaaattcctgacttaaatacgttcccagcggaatgcccagcaaattggcgactgtcatcccggaaaccatccccgccacggcggcggtgacttttccgggtttgataattttacttaacacgatcgctccgacgccaaaaaatgcgccatgcggaaagccggataccagccgaccaatggcgagcatcaggtaagagctagagagcgtgaacatggcgttgccaatgacgcacaacgccaccagaaacaacaagatatgtttgagactgtagcggctggaaaagagtgcgatgattggcgcaccgaccaccacccccagtgcataatagctgatcatatgcccggcggcaggaatgctaattcctacgttatgcgccagctccgtgagcacgcccataatgccaaattcggccatccccaaaccaaacgtgcccagagccaaagataaaatgacttttttcataccaccatcacaaccaccagaacggctaccaatcaccgtagccaataaagtgatagcttgcaggataacgaccagcaaggccaagagataattcgcccctctgtattcattatcctgctgaatagttatttcactgcaaacgtactttccagtttgctgtagcccaggccgttgatctttttcactttgatctgcaccggaatacgctctttcatcgcttctacgtggctaatcacaccgatggttttgccactggcgttcagggcatccagcgcatcaagggcggtatccagcgtttcgctatccagcgtgccaaaaccttcatcaaggaacaggctgtcaatacgtgttttatggctgaccagatcgctaagcgccagcgccagcgccagactaacgaggaaactttcgccgccggaaagggtacgggtatcgcgtaccgcatctgcctgccaggtatcaacaacctcgacttccagcgcctcgctggctttgcgctgtaacagatagcgcccgtgcagccgggtaagttgctgattagcgagatggactaaattatccagcgtcagcccctgggcaaacttgcggaatttatcgccctctttggaacctattaggctattcagatatccccagtcctcaacctgctgcgtcatttgagcaatttgctgcattaaggtttgttgttgctgacggttatctgcatcctgcttcagctgctggcgaatctcgccttgactcgtggtgttttcacgcaacttttggtgagtttgcgctaactcttgctgaatctgctccaccgtcacagtgagagccaacccgtcgtcaggtcggtgttgttgatgctgtgccagcgtttctgctgtctgagtgaccagagtttgcgcctgacggcgctggttttccagattctgcttgagctgttccagctgcgttagtgtttgttcatccattagcgccgcaaggaacgcctgctgatcgtcaaagacgctggcctgtagcgcggtgtcaaactgcgcctgggctttttgcagactttgcgccgccagaacatcctgttgctgtaacgtctgctgctggctgtgtaatgcgagacattgttcatgtacctgccgccagttttccaataccacagtttcttcgcagtgcgggagttcatcactttgcggcaacgtttccagaatcggcgtcagctgctgaatacggttttgcagcgcggttaattcgttctggcgttgctgccagctctgcgcttcttgctgacgtgtcgccaaccagctctcttcttcatcttcctgtggcaatgtcagtgcataacccgtcaatgtcgttaaaagtagttgctggcgttgttcaatttgctgttgatactggataatttgctgattatgcgcggcaatctgcccttgtaattcatgccgttggctgagtaaccgcagctggcgttcgtgctcatcttgtgcatccagccacggttgaatatcgtccagtggctgcaaggtgatattgaggctggccgtgacggcttgccattgttgagtaagtgcttgctcatcttgtcggaggctttgcgcttcgttttcatcacgctgaagctgctttgttatggcgtccagttgcccacgtagcgtcgcaccttcttcaccgagctttttaacttcgttttccagcgccagtaatcgagactgattaacgccaggctccagcgcctgatacgcctcgaccgccgggtggctggtggaaccacaaagtgggcaaggctgacccgcctgtaactgtgcacgttgagcttccagcgttttgatgcgcgcttcctgctcgcaaatggttttcacatcggcaagttgctgcgtcttttctttataacgctggcgcatttcgttaagtgcggcgttacgttgcgtctgttcttgcgtgacattctggatagcgacctgtaactgcgccagacgtttttgttggggaacaatctgtccatgcagcgcgaccaggtgctgacgcagtgggcgttgctcagcatgttgcgccagggcggtagcaacttcatcggcggttaacgtcaacgtgatcgccgcaagcgcattaagtttttgctcagcatgggttaactgttgctgccattgccgcagatgctcgcgatcgctggtttgttgggagaactgcgcacgccaacccgccggttcgttgttccactgacggaagcggtcgtgttcctgtaaccaggtattcaggctttgttgctgctgctgtaattctgcactctgcttcgccgcgtggtggcgaatgctcgcgcgaagcgccattgtgctctgtaagcgagtatttacttcttcaatctgctggcgaatatgcgccagcgccgcgctgtgttctgcgatgcgttcccagtgtggacgaagatttcgtgccggttgtgccagactaagcgccgccagttgaggttgcgctttttcttcttcggctaacgcctgttgcaaggcctgctgacggcggctggcttcttgctgcaattcgtcctgacgcgttaaccagtttaggctttgttgttcttgctgctgcgcggtaattaactgtttttcttcgtcagtaagtacctgcaaactcgctgtcaggctttgcacttgttccggcgtgagcaacgtgacgccgctggcctgcgcttgcagcttctccagctctgtgcgggcgcttttgtgctgctcaaaaaccatcgcgctgatttgcccgtagatttcagtgccggttaactcctcgagcaattccgcgcgttctttgggtttggcattcaggaaggcagcaaattgcccctggctaagcagcatgctacgggtgaagcgcccgtaatccagcccggttaacgtcgctgtcagttccagcttatctttcactttgtcggcgagaattttgccgtcggcgcagcgcgccagctctacgcgtggcacctgcaaattaccgtcgggttggttacgcgcccgattctggctccagaatgcacggtacgcttcacctttcacttcaaactccacctccgccagacattcggcggtatcgcgggtcatgagatcattttggctttgactaacgttagagagacgcggagtttcgtgatacagcgccagacaaatggcgtccagcagggtggttttccccgcacctgttgggccggtaatagcaaacagcccgttgctggcgaacggctcgcgggtgaaatcaatcttccattcgccttttaaactgttcaggtttttcaggcgcaggctgagaattttcatgcttcgtgttctccggcgagggtatgcaacgtcgtggtgaaaagatgctgcagacgttgctgctggctttcatccagttcttccagtgccagacggcgattgaacacctcttcgacgctgagttcgctgagggtttcacgctgttggctggctaacacacgctcgcgctgttcacgactccgacgtaccagcaatacttcgacaggcaaactttcggttaatgcctggattttgcgctgaatatcatgcagatactcatcagtagtgatttcgatatccagccagacaggtggctcctggcttacatcgcgccactgttccagctgtgcggtaatgctcgccagatcgcctttcagcactgccatgggttgcgttaccggtacgttcaggttttccacgctctctaatttgccgttactaaatgtcaccagatggacatatttactcttaccgcattcatcaaaactcagtggaatgggggagccgcaatagcgaacatgttccatgccgccaataatctgtgcgcggtgaatatgcccgagcgcgatgtagtcggctggtggaaagttttgtgccggaaacgcgtccagcgtgccaatataaatgtcacgcacggcgtcacttttactggcccccacggtcgttaaatgtcccgtggcgatgatgggcagaggctgatcgccgcgcagtttgcaggcatcggcatagtgttgttggtaataatcggtaatcgctgccagtaaatgctgctgtttttcaataccgttaagccccgcctggctggtaataatgtcacgcggacgtaaaaacggaatggggcacagcactgcgcctggcgtcccgtcgcgacgaggcaagatttgcggcgcatgtccggcgctggcgaccacggtagtattgaggaacgccatgatatcgcggctttcattcagcgtggcgacgctgtcatggtttcctgccagtaccaccagatgacagccagtttgctgtaaattgacaacaaaacggttgtataacgtgcgggcgtaactgggcgggctgccggtatcgaaaacatcaccggcaacaataatcgcatccacctgatgggtttgtgctgtctccagcagccagtcaagaaaagcctgatgttcagcttcgcggcttttactgtagaagttctggccgagatgccagtcactggtgtgaaggatgcgcataacggttccctggcgaaaaagcatgggcgcgattatacccaaacagatgtgccatttgcttttttctgcgccacggaaatcaataacctgaagatatgtgcgacgagcttttcataaatctgtcataaatctgacgcataatgacgtcgcattaatgatcgcaacctatttattacaacagggcaaatcatggcgagacgtattctggtcgtagaagatgaagctccaattcgcgaaatggtctgcttcgtgctcgaacaaaatggctttcagccggtcgaagcggaagattatgacagtgctgtgaatcaactgaatgaaccctggccggatttaattctcctcgactggatgttacctggcggctccggtatccagttcatcaaacacctcaagcgcgagagcatgacccgggatattccagtggtgatgttgaccgccagaggggaagaagaagatcgcgtgcgcggccttgaaaccggcgcggatgactatatcaccaagccgtttagcccgaaggagctggtggcgcgaatcaaagcggtaatgcgccgtattagcccaatggcggtggaagaggtgattgagatgcagggattaagtctcgacccgacatctcaccgagtgatggcgggcgaagagccgctggagatggggccgacagaatttaaactgctgcacttttttatgacgcatcctgagcgcgtgtacagccgcgagcagctgttaaaccacgtctggggaactaacgtgtatgtggaagaccgcacggtcgatgtccacattcgtcgcctgcgtaaagcactggagcccggcgggcatgaccgcatggtgcagaccgtgcgcggtacaggatatcgttttagtacccgcttttaacgccttgctcatcggacgcagagcagggcttatgatttcttaactggagtatcttacgtgctggaacggctgagctggaaaaggctggtgctggagctgctactttgctgcctcccggctttcatcctgggtgcattttttggttacctgccctggtttttgctggcaagcgtaacaggactgcttatctggcatttctggaatttattgcgccttagttggtggctgtgggtggatcgcagtatgaccccgccaccggggcgtggtagctgggaaccgctactatacggcttacaccagatgcagctgcgaaataaaaaacgccgccgtgaactgggcaatctgattaaacgctttcgtagcggcgcggagagcctgcccgacgcggtggtgctgaccacggaagagggcggtattttctggtgtaacggtctggcgcaacaaattcttggtttgcgctggccggaagataacgggcagaacatccttaacctactgcgttacccggagtttacgcaatatctgaaaacgcgtgatttttctcgcccgctcaatctggtgctcaacaccgggcggcatctggaaattcgcgtcatgccttatacccacaaacagttgctgatggtggcgcgtgatgtcacgcaaatgcatcaactggaaggggcgcggcgtaacttttttgccaacgtgagccatgagttacgtacgccattgaccgtgttacagggttacctggagatgatgaatgagcagccgctggaaggcgcggtacgcgaaaaagcgttgcacaccatgcgcgagcagacccagcggatggaaggactggtgaagcaattgctgacgctgagcaaaatagaagccgcaccgacgcatttgctcaatgaaaaggttgatgtgccgatgatgctgcgcgttgttgagcgcgaggctcagactctgagtcagaaaaaacagacatttacctttgagatagataacggcctcaaggtgtctggcaacgaagatcagctacgcagtgcgattagcaacctggtctataacgccgtgaatcatacgccggaaggcacgcatatcaccgtacgctggcagcgagtgccgcacggtgccgaatttagcgttgaagataacggaccgggcattgcaccggagcatattccgcgcctgaccgagcgtttttatcgcgttgataaagcgcgttcccggcaaaccggcggtagcggattagggttagcgatcgtgaaacatgctgtgaatcatcacgaaagtcgcctgaatattgagagtacagtaggaaaaggaacacgtttcagttttgttatcccggaacgtttaattgccaaaaacagcgattaatccgcctttgtcatcttttattgccataagccagtcgatgctggcttattttctttgcagtcaaaatacgggcgttagattttacaacgattggtgattttttgttcgcatgattagccatgtctttttcacggaaatagtgttttatactggttggtgatttcttatcgctatatacctctggtttttagatccctccttgctttaaaacgttataagcgtttaaattgcgcttcaggtgctgtcatactgactgcattaacgcggtaaatcgaaaaactattcttcgccgcgcctggttgggagtatttcccgctaaaattgtttaaatataccgctgtatcatccccagggattggcacaaaaatttaacgttacaacaccacatccacaggcagtatgatttatgacccatcaattaagaagccgcgatatcatcgctctgggctttatgacatttgcgttgttcgtcggcgcaggtaacattattttccctccaatggtcggcttacaggcaggcgaacacgtctggactgcggcattcggcttcctcattactgccgttggcctgccggtattaacggtagtggcgctggcaaaagttggcggcggtgttgacagcctcagcacgccaatcggtaaagtcgctggcgtactgctggcaacggtttgttacctggcggtggggccgcttttcgctacgccgcgtacagctaccgtttcctttgaagtggggattgcgccgctgacgggtgattccgcgctgccgctgtttatctacagcctggtctatttcgctatcgttattctggttagcctctatccgggcaagctgctggataccgtgggcaacttccttgcgccgctgaaaattatcgcgctggtcatcctgtctgttgccgctattgtctggccggcgggttctatcagcacggcgactgaggcttatcaaaacgctgcgttttctaacggcttcgttaacggctatctgaccatggatacgctgggcgcaatggtgtttggtatcgttattgttaacgcggcgcgttctcgtggcgttaccgaagcgcgtctgctgacccgttataccgtctgggctggcctgatggcgggtgttggtctgactctgctgtacctggcgctgttccgtctggggagtgacagcgcgagcctggtcgatcagtctgcaaacggcgctgctattctgcatgcttacgttcagcacacctttggcggcggcggtagcttcctgctggcggcgttaatcttcatcgcctgcctggtaacggcagttggcctgacctgtgcttgtgcagaattctttgcccagtacgtaccgctctcttatcgtacgctggtgtttatcctcggcggcttcagcatggtggtttctaacctcggcttaagccagctgatccagatctccgtaccggtgctgaccgctatttatccgccgtgtatcgcactggttgtattaagttttacacgcagttggtggcataatagctcccgcgtgattgctccgccgatgtttatcagcctgctttttggtattctcgacgggatcaaagcatctgcattcagcgatatcttaccgtcctgggcgcagcgtttaccgctggccgaacaaggtctggcgtggttaatgccaacagtggtgatggtggttctggccattatctgggatcgcgcggcaggtcgtcaggtgacctccagcgctcactaaatcactgaacatttgttttaaccacggggctgcgatgccccgtggttttttattgtgttgatgggttaggaattgatggaaagtaagaacaagctaaagcgtgggctaagtacccgccacatacgctttatggcactgggtagtgcaattggcaccgggctgttttacggtagcgcagacgccatcaaaatggccggtccgagcgtgttgttggcctatattatcggtggtatcgcggcgtatatcattatgcgtgcgctgggggaaatgagcgtacataacccggccgccagctctttcagccgttatgcgcaggaaaacctcggcccgctggcaggttacattaccggctggacctactgctttgaaatccttattgtcgccatcgccgatgtgaccgcttttggtatctatatgggtgtctggttcccgacggtgccgcactggatttgggtactgagcgtggtgctgatcatttgcgccgtaaacctgatgagcgtgaaggtattcggtgagctggaattctggttcagcttctttaaagtcgccaccatcatcatcatgattgtcgccggtttcggcatcatcatctgggggattggcaacggcgggcaaccgaccggtattcataacctgtggagcaacggcggcttcttcagtaacggctggcttggcatggtaatgagcttgcaaatggtgatgtttgcttacggtgggatcgaaattatcgggattaccgccggtgaagcgaaagatcctgagaaaagcataccgcgtgcgattaactccgtgccgatgcgtattctggtgttctacgtcggtacgctgttcgtcattatgtctatctacccgtggaatcaggttggcactgccggtagcccgttcgtgctgacgttccagcatatgggcattacctttgccgccagcattcttaactttgttgtgctgactgctagcctgagcgcaattaacagtgatgtatttggcgtaggccgtatgctccacggtatggcagagcagggcagcgcgccgaaaattttcagcaaaacgagccgtcgcggtattccgtgggttacggtgctggtgatgactaccgcgctgctgtttgcggtgtatctgaactacatcatgccggaaaacgtcttcctggtgatcgctagcctggcaaccttcgccacggtgtgggtgtggattatgatcctgctgagccaaattgccttccgtcgccgtttgccgccagaagaagttaaggcgctgaaatttaaagtgccgggtggggtagcaacgaccatcggcgggctgattttcctgctctttattatcgggttgattggttatcacccggatacgcgtatcagcctgtatgtcggtttcgcgtggattgttgtgctgttgattggctggatgtttaaacgccgccacgatcgtcagctggctgaaaaccagtaatccttgcgttctgtaagccggttcaggaggaaatcctgatccggctattccgaaagttatccgcccccgtcctcctcccccaaatatccttcagatgatgagtgatcctgcattaggctatggcaaggtgatcagattttcatcacaggggaattatgatgttaaatgcatggcacctgccggtgcccccatttgttaaacaaagcaaagatcaactgctcattacactgtggctgacgggcgaagacccaccgcagcgcattatgctgcgtacagaacacgataacgaagaaatgagtgtaccgatgcataagcagcgcagtcagccgcagcctggcgtcaccgcatggcgtgcggcgattgatctctccagcggacaaccccggcggcgttacagtttcaaactgctgtggcacgatcgccagcgttggtttacaccgcagggcttcagccgaatgccgccggcacgactggagcagtttgccgtcgatgtaccggatatcggcccacaatgggctgcggatcagattttttatcagatcttccctgatcgttttgcgcgtagtcttcctcgtgaagctgaacaggatcatgtctattaccatcatgcagccggacaagagatcatcttgcgtgactgggatgaaccggtcacggcgcaggcgggcggaagtacgttctatggcggcgatctggacgggataagcgaaaaactgccgtatctgaaaaagcttggcgtgacagcgctgtatctcaatccggtgtttaaagctcccagcgtacataaatacgataccgaggattatcgccatgtcgatccgcagtttggcggtgatggggcgttgctgcgtttgcgacacaatacgcagcagctgggaatgcggctggtgctggacggcgtgtttaaccacagtggcgattcccatgcctggtttgacaggcataatcgtggcacgggtggtgcttgtcacaaccccgaaagcccctggcgcgactggtacagctttagtgatgatggcacggcgctcgactggcttggctatgccagcttgccgaagctggattatcagagcgaaagtctggtgaatgaaatttatcgcggggaagacagtattgtccgccactggctgaaagcgccgtggaatatggacggctggcggctggatgtggtgcatatgctgggggaggcgggtggggcgcgcaataatatgcagcacgttgccgggatcaccgaagcggcgaaagaaacccagccggaagcgtatattgtcggcgaacattttggcgatgcacggcaatggttacaggccgatgtggaagatgccgccatgaactatcgtggcttcacattcccgttgtggggatttcttgccaataccgatatctcttacgatccgcagcaaattgatgcccaaacctgtatggcctggatggataattaccgcgcagggctttctcatcaacaacaattacgtatgtttaatcagctcgacagccacgatactgcgcgatttaaaacgctgctcggtcgggatattgcgcgcctgccgctggcggtggtctggctgttcacctggcctggtgtaccgtgcatttattacggtgatgaagtaggactggatggcaaaaacgatccgttttgccgtaaaccgttcccctggcaggtggaaaagcaggatacggcgttattcgcgctgtaccagcgaatgattgcgctgcgtaagaaaagtcaggcgctacgtcatggcggctgtcaggtgctgtatgcggaagataacgtggtggtatttgtccgcgtgctgaatcagcaacgtgtactggtggcaatcaaccgtggcgaggcctgtgaagtggtgctacccgcgagtccgtttctcaatgccgtgcaatggcaatgcaaagaagggcatgggcaactgactgacgggattctggctttgcctgccattagcgctacggtatggatgaactaacgttttataacgccttgcgactcgcctgcgccatcatccgcggataaaactgccagaagcgggtttcgagggcgtcataatgagcgtctaaatcgtaccaggagtcacgcagggcatccagacgtgggcggcggcttgccatgccgtttaacacgttctggatgaaatccatatcgcgatagcgcaccagccactgctcactccacaagtaattgttcagattgataaaacgtggcggactgtccggcaaaatcgtcatcacttgctcgcgggcataacagacaaattcctgtagcggaaagtccgggctcagctggctccagtggcgggaaagaaagtgatcccacatgacatccagcgtaataggcgcaacgcggcgcgtttcactacgaaaccactcccgtgcttcgcggacttccggcagattgtcagtcaatacgtcgatacgtcgatgcatatgaatgccagccacgacgtcgggcggaaaactttcttcaggatttccgcgtacgaaatcagccagtaaattgccggaaaggctgctttccgcgagatgggctaaatgcaggtgagctaaaaaattcatcgattatattctatccaaaagggggtaaaggttgcagggagagcgccccggcactagactacccgcctcttattttagtctgagtcagtgtcatgcgcgttaccgatttctcctttgaattgcccgaatccctgattgcccactatcccatgcctgaacgcagtagctgtcgtttactgagcctggacgggccgacgggcgcgctgacgcacggtactttcaccgatttacttgataagctcaaccccggcgatcttctggtttttaataatacccgcgtgatcccggcgcgcctgtttgggcgtaaagccagcggcggcaagattgaagtgctggttgaacggatgctcgacgacaaacgcattcttgcgcatattcgcgccagcaaagcgccaaaacctggcgcagaactgctgctgggcgatgacgaaagtattaacgcaacaatgaccgcgcgccacggcgcactgtttgaagtcgaatttaatgatgaacgcagcgtgctggatattctcaacagcatcggccatatgccgctgccgccgtatatcgaccgtccggacgaagacgctgaccgcgaactttatcaaaccgtttatagcgaaaaaccgggcgcggttgcagccccgaccgcaggtctgcattttgacgagcctttgctggaaaaattgcgcgccaaaggcgtggagatggcgtttgtgacgttgcacgttggtgcgggcaccttccagccggtgcgcgtcgacaccattgaagatcacatcatgcacagcgaatacgctgaagtaccgcaggatgtggtagacgcggtactggcggcgaaagcgcgcggtaaccgggtgattgcggttggcaccactagtgtacgtagcctggaaagcgcggctcaggcagcgaaaaacgatctcattgaaccgttcttcgacgatacccaaatctttatctatccgggcttccagtacaaagtggtcgatgcgctggtgacgaacttccacttgccagagagcacgctgattatgctggttagcgcctttgccggttatcaacacaccatgaacgcctataaagcagcggtagaagagaaatatcgcttttttagttacggtgatgcgatgtttatcacgtacaatccgcaggcaattaatgagcgcgtcggggagtaattccgcggcgctggtttaaaacgttggactgtttttctgacgtagtggagaaaaaatgaaatttgaactggacaccaccgacggtcgcgcacgccgtggccgcctggtctttgatcgtggcgtagtggaaacgccttgttttatgcctgttggcacctacggcaccgtaaaagggatgacgccggaagaagttgaagccactggcgcgcaaattatcctcggcaacaccttccacctgtggctgcgcccgggccaggaaatcatgaaactgcacggcgatctgcacgattttatgcagtggaaggggccgatcctcaccgactccggcggcttccaggtcttcagccttggcgatattcgtaaaatcaccgaacagggcgtgcacttccgtaacccgatcaacggcgatccgattttcctcgatcctgaaaaaagtatggagattcagtacgatcttggtagcgatatcgtcatgatctttgatgagtgtacgccgtatcctgctgactgggattacgcaaaacgctccatggagatgtctctgcgttgggcgaagcgtagccgtgagcgttttgacagtctcggaaacaaaaatgcgctgtttggtatcatccagggcagcgtttacgaagatttacgtgatatttctgttaaaggtctggtagatatcggttttgatggctacgctgtcggcggtctggctgtgggtgagccgaaagcagatatgcaccgcattctggagcatgtatgcccgcaaattccggcagacaaaccgcgttacctgatgggcgttggtaaaccagaagacctggttgaaggcgtacgtcgtggtatcgatatgtttgactgcgtaatgccaacccgcaacgcccgaaatggtcatttgttcgtgaccgatggcgtggtgaaaatccgcaatgcgaagtataagagcgatactggcccactcgatcctgagtgtgattgctacacctgtcgcaattatagtcgcgcttacttgcatcatcttgaccgttgcaacgaaatattaggcgcgcgactcaacaccattcataaccttcgttactaccagcgtttgatggcgggtttacgcaaggctattgaagagggtaaattagagagcttcgtaactgatttttaccagcgtcaggggcgagaagtaccacctttgaacgttgattaatattaataatgagggaaatttaatgagcttttttatttctgatgcggtagcggcaacgggtgcaccggcgcaaggtagcccgatgtctttgattttgatgctggtggtattcggtctgattttctatttcatgatcctgcgtccacagcagaagcgcaccaaagaacacaaaaagctgatggactccattgccaaaggtgatgaagttctgacgaacggtggcctggttggtcgcgtaaccaaagtagcggaaaacggctacattgctatcgcgctgaatgacaccactgaagtagttattaaacgtgacttcgtagctgccgtcctgccgaaaggcaccatgaaggcgctgtaattaaaatttttccctaagggaattgccgtgttaaaccgttatcctttgtggaagtacgtcatgctgatcgtggtgattgtcatcggtctgctgtatgcgcttcccaacctgtttggtgaggatccggctgttcagatcactggtgcgcgcggagtcgccgccagtgagcaaacgctgatccaggtccagaaaacgttacaagaagaaaaaataactgctaagtctgtggcactggaagagggcgctattcttgcgcgcttcgactccactgacacccagttgcgcgctcgtgaagcattaatgggcgttatgggtgacaaatacgtcgtggcgcttaaccttgccccggcaacgccgcgctggctggcagctattcacgctgagccgatgaagctcggccttgacctgcgtggcggcgttcacttcctgatggaagtggatatggacaccgcgcttggcaaactccaggaacaaaatatcgatagcctacgcagtgacctgcgcgaaaagggcatcccgtataccactgttcgtaaagaaaacaactacggcctgagcatcactttccgcgatgctaaagctcgtgatgaagccattgcgtatctgagcaagcgccatccggacctggtgattagcagccagggcagcaaccagctgcgtgcggtaatgagcgatgctcgtctgagtgaagcgcgtgaatatgcggtgcagcagaacattaatatcctgcgtaaccgtgtaaaccaacttggcgtggcggagccggtggttcagcgtcagggtgctgaccgtatcgttgttgaactgccaggtattcaggacactgcgcgtgcgaaagagattctgggtgcgacggcaacgctggaattccgtctggtaaacaccaacgttgaccaggccgctgcggcatccggtcgcgtaccgggcgactctgaagtgaaacagacccgcgaaggtcagccagttgtgctgtacaaacgcgtaattctgaccggtgaccatatcaccgactccacttccagccaggacgaatacaaccaaccgcaggttaacatcagcctcgatagcgctggtggtaacatcatgtctaacttcactaaggacaacatcggcaaaccgatggcaaccctgtttgtggagtacaaagacagcggtaagaaagatgcaaatggtcgtgcggttctggtgaaacaggaagaggtgattaacatcgccaacatccagtctcgtctgggtaacagcttccgtatcaccggcatcaacaacccgaacgaagcccgtcagctgagtctgctgctgcgtgccggtgcgttgatcgcgccgattcagattgttgaagaacgtaccattggcccaaccctgggtatgcagaacattgaacaggggctggaggcttgccttgccggtctgctggtttctattctgttcatgatcatcttctataagaagtttggtctgattgcgaccagtgctctgattgccaacttgatcttaatcgtcggcattatgagcctgttgccaggcgcaacgctgagtatgccaggtatcgcgggtatcgtcttaacccttgcggtggcggtcgatgcgaacgtactgatcaacgaacgtattaaagaagagttgagcaacggacgtactgttcaacaggcaattgatgaaggttatcgtggcgcattcagttctatcttcgatgcgaacatcaccacgctgattaaagtcatcatcctgtacgcagtgggtaccggggcaattaaagggttcgcgattactaccggtatcggtgtggcgacgagcatgtttaccgcgattgtcggtacgcgtgccatcgtaaacctgctatatggcggcaagcgcgtcaagaagctgagtatctgaggagtgcgatgtggcacaggaatatactgttgaacaactaaaccacggccgtaaagtctatgactttatgcgctgggactactgggctttcggcatctctggtctgctgttaatcgctgctatcgttattatgggcgtgcgcggctttaactgggggctggatttcaccggtggtacggttattgaaattacgctcgaaaaaccggctgaaattgacgtaatgcgtgatgcattgcaaaaagccggttttgaagagccgatgctgcaaaactttggtagcagccatgacatcatggtccgtatgccgcctgctgaaggcgaaaccggcggtcaggtgttgggcagccaggttctgaaggtgattaacgaatccaccaatcagaatgcagcagtgaagcgtattgagttcgtcggtccgagcgtgggggcagaccttgcgcaaaccggtgcgatggcgttgatggcagcgctgctgtctatcctcgtgtacgtaggtttccgctttgagtggcgactggcggcaggggtggttattgcgctggcgcacgacgttatcattacgctgggtattttgagcttattccatatcgagattgacctgaccattgtggcaagcttgatgagcgttatcggttacagccttaacgacagtatcgtggtaagcgaccgtattcgtgaaaacttccgcaagatccgtcgcggtacgccttacgaaatctttaacgtgtccttgacccagacgctgcaccgtaccttgatcacatccggtactaccttgatggttatcctgatgctgtacctcttcggtggtccggtactggaaggcttcagcctgaccatgcttatcggtgtttccatcggtactgcatcttccatctatgtggcatctgcgttggctctgaaactgggtatgaagcgcgaacacatgttgcagcagaaagtggaaaaagaaggggcggatcagccgagtattctgccgtaatcaagttcccgttgatgttgaaaatcccggtcagaagatcgggattttttttgatgtatggagattgcgaaaatccccgcatcttgggaaactgcgcgtaaccctacatttcatccaggtaacttttcatggctatcatcccaaaaaactatgcgcggttagaaagcggctatcgcgaaaaagcattaaaaatctatccgtgggtctgcggtcgctgttcccgcgagtttgtttattccaacctgcgtgaacttaccgttcaccacattgatcacgaccataccaataacccggaagatggcagtaactgggaattgttgtgtctctattgccacgatcatgagcatagcaaatataccgaagcggatcagtatggtacgaccgttatcgcaggggaagatgcgcagaaagatgtcggtgaagcgaagtacaacccattcgctgacctgaaagcgatgatgaacaagaagaagtgattaaaacgtaaaattgcctgatgcgctacgcttatcaggcctacgttatttcagcaatatattgaatttacgtgcttttgttggccggacaaagcgtttacgccgcatccggcatgaacaaagcacacgttgttaacaatcagaaatgccgggaataaatcccggcattttcataatcagaagttgtaacctactaccaggtaaccaccccagccggtagagcgaacgttgaagttgccgttgccgaagttcagttctgcatcgtcgttccactgaccaccgtcgtgccagtaacgagctacgacagagtagtgccagtgatcgtagttcagagccagaatatggctggaagcgatagagttattagtacgggtcttaataccgttgattgcgttaccgctgtcatcccctaaatcggaaccccagtcgaagttggtgaagccgatgtagctcagctgaccgccccacagatcggtaatcggcacaaagtatttaattttgaaacggtaaccgtcccactcgttttcgttcgctgcgccatagttctgccactggtatttcgcatagacgttcatggacaggctcatcggcaggccagtgtcgatatcggtacccagacccatgtaccaggtgctctggcgaccatctttattacgacccatgtcgtaaatgtagttgttcgcgaagtaccactctttgaacggaccgaagctaaggtcagtattggtcagcttgtcgatggagaaacgtggttcgatttccataaacagcggagaaccgtggttccagatacctttagcatcggagttaccgccgaagaataccggcgcatccgcataaccatagaagtcgaaccagtcttttttagcgaatgcttcgtactcaaggtaggtatcgttgcggatctgcggtccgaaacgggtgtgatagcttccgacaacgttaacgctctggtgccaccagtcggaaagatactgcggtttgtcgttttcagctgcgttgacagtaaaagagctagagagcgccagtaccgcaccggctgccagtaatgtttttttcatatgtatgccactgtttgaaaatcccttgcgggagtgaaaaaggcgcaaattgcgtttctaaatatttcgtatacagaggagcctattataaaaatcattgctcacaaaaatatgtttcgtttcacagttctatcatttacgtaatcgattgcgttcacgtttacacacattcgggcggggattgtactgactttcgcccttgttgcaaacttttactatcaatccaggtgatgtaagcagagtaacaaaatgacggggaaagatgttgcgggacgcacaaaatcgtcccgaaatacgtttactgcataacaggttgaatgtcgtggatacgtacaaagcctaactgatccacagaaatcccctttaactgtaacggaatatcaacatcgctgggggcgaggacgctggcaggggcattaatcaattgattctgcacattgatttcctgaaagttgtctattgttccctgaatttgcccatattcaacagttccgctgaatgcgggcaagggatcattgctctcaccctgaatacgtagtgtaagggtggtgccatctgcatcaggcgtaatattcaccaggctcatacgtaaagtaccgatctggctttccagtcttgccggtgttttcgctccaggcagaaggtaaaccccactgctggattttgcattcagcctgttttgctgagtgattttgactgtttcttgattgagttgcgtcatctcctggttcagcgtgctgacgctgtgtttcatctgtcgcacttcactttgctgcacacaggcgctaaggctgaacaggcttcccagcaggagcagtcgaaaaacgttagtattcataggtcgtccctttctcgtcgcaattagcctaatggtagagggtaaaagcagcgaaagcatcgatcctttatctcaaaagcgttgcgcctttgttgtatcgtcagttcagggtaaaatagatttccgttaaccacctggtcaggacgccgtatgcattgcccattctgtttcgccgtggacactaaggtaattgactctcgtctcgtgggcgagggtagttccgtacgccgccgtcggcagtgtctggtgtgtaatgaacgtttcaccacctttgaagtggcggagctggttatgccgcgtgttgtaaaaagcaacgacgtgcgtgaaccgtttaatgaagagaaattgcgtagcggaatgctgcgggcgctggaaaaacgtccggtgagttccgatgacgtcgaaatggcaatcaatcatattaaaagccagctgcgcgccaccggtgagcgcgaagtgccgagcaagatgattggcaatctggtgatggagcaattgaaaaagctcgataaagtcgcctatatccgttttgcctctgtctaccgcagtttcgaagatatcaaagaatttggcgaagagatcgcgcgcctggaggactaagccgtgcaggacgagtattacatggcgcgggcgctaaagctggcgcaacgaggacgttttaccacgcatcccaacccgaatgtcgggtgcgtcattgtcaaagatggcgaaattgtcggtgaaggttaccaccaacgtgcgggtgaaccacatgccgaagtacacgcgttgcgtatggcgggtgaaaaagccaaaggtgcgaccgcctatgtcacactcgaaccctgtagccatcatggtcgtacgccaccgtgctgtgacgcactcatcgccgctggcgtagcgcgcgtggttgccagcatgcaagatcctaacccgcaggtcgctgggcgtggactttaccgtctgcaacaggctggcattgacgtcagccacggcctgatgatgagtgaagccgagcaattgaataaaggctttctcaagcggatgcgcaccggctttccttatattcagttaaaacttggcgcaagccttgatggtcgcacggcgatggcgagcggcgaaagccagtggatcactagcccccaggcgcggcgtgatgtacaactactgcgcgcgcaaagtcatgccattttaaccagcagcgccacggtgctggcggatgatcctgccttaacggtgcgttggtctgaactggatgaacaaactcaggcgctctatccgcaacaaaatctccgtcagccgatacgtattgtgattgatagccaaaatcgcgtgacgccggtacatcgcattgtgcagcagcccggcgaaacctggttcgcgcgtacgcaggaagattctcgtgagtggccggaaacggtgcgtaccttgctgattccagagcataaaggtcatctggatctggttgtactgatgatgcaactgggtaaacagcaaattaacagcatctgggtggaagcggggccaacgctcgctggcgcattgctgcaggcgggtttagtcgatgagctgattgtctatatcgcacctaaactattaggcagcgacgcccgcggattatgcacgctgccagggcttgagaaattagccgacgccccccaatttaaattcaaagagatacgtcatgtaggcccggatgtttgcctgcatttagtgggtgcatgatctcccggctcgaaagggaagcagcgcacgaaatattatgctaaaatccgcccccctgcggggccatactcgaacccgaaggaagaaaatgaacattattgaagctaacgttgctaccccggacgctcgcgtcgccatcaccatcgcgcgtttcaacaactttatcaatgacagcctgctggaaggtgcaattgacgcactgaaacgtatcggtcaggtaaaagatgaaaacattaccgttgtttgggtgcctggtgcctatgagctgccgctggcggcgggtgcactggctaaaaccggtaaatacgacgcggtgattgcgctgggtacggttattcgtggtggcactgcccactttgaatatgtcgctggtggtgcaagcaacggcctggcgcatgttgcccaggacagcgaaattccggttgcttttggggttctgaccactgaaagcattgaacaagcgatcgaacgtgctggcaccaaagctggcaacaaaggtgcagaagctgcactgaccgcgcttgaaatgattaatgtattgaaagccatcaaggcctgaaattagtaaggggaaatccgtgaaacctgctgctcgtcgccgcgctcgtgagtgtgccgtccaggcgctctactcctggcagttgtcccagaacgacatcgctgatgttgaataccagttcctggctgaacaggatgtaaaagacgttgacgtcctgtacttccgtgagctgctggccggggtggcgactaataccgcatacctcgacggactgatgaagccatacctgtcccgcctgctggaagaactgggacaggtagaaaaagcagtactgcgcattgcgctgtacgaactgtctaaacgtagcgatgtgccatacaaagtggccattaacgaagcgatcgaactggcgaaaagcttcggcgcagaagacagccataagttcgtcaacggcgtactcgataaagcagcacctgtgattcgccctaacaaaaagtgatatccaggccggtagattcacggaagaccgttccatgatcgccggccttttcttttttacctgctgaggcataacgtatggcatgtggcgagttctccctgattgcccgttattttgaccgtgtaagaagttctcgtcttgatgtcgaactgggcatcggcgacgattgcgcacttctcaatatccccgagaaacagaccctggcgatcagcactgatacgctggtggcgggtaaccatttcctccctgatatcgatcctgctgatctggcttataaagcactggcggtgaacctaagcgatctggcagcgatgggggccgatccggcctggctgacgctggcattaaccttaccggacgtagacgaagcgtggcttgagtccttcagcgacagtttgtttgatcttctcaattattacgatatgcaactcattggcggcgataccacgcgtgggccattaagtatgacgttgggtatccacggctttgttccgatgggacgagccttaacgcgctctggggcgaaaccgggtgactggatctatgtgaccggtacaccgggcgatagcgccgccgggctggcgattttgcaaaaccgtttgcaggttgccgatgctaaagatgcggactacttgatcaaacgtcatctccgtccaagcccgcgtattttacaggggcaggcactgcgcgatctggcaaatagtgccatcgatctctctgacggtttgatttccgatctcgggcatatcgtgaaagccagcgactgcggcgcacgtattgacctggcattgctgccgttttctgatgcgctttctcgccatgttgaaccggaacaggcgctgcgctgggcgctctctggcggtgaagattacgagttgtgtttcactgtgccggaactgaaccgtggcgcgctggatgtggctctcggacacctgggcgtaccgtttacctgtatcgggcaaatgaccgccgatatcgaagggctttgttttattcgtgacggcgaacctgttacattagactggaaaggatatgaccattttgccacgccataaagatgtcgcgaaaagtcgcctgaagatgagtaatccgtggcatctacttgctgtcggattcggaagtggattaagcccgatcgttcctgggacgatgggcagcctggcagcgattccgttctggtatctgatgacctttttgccctggcagctctacagcctggtggtgatgctggggatctgtatcggcgtctatctttgtcatcaaacggcgaaagacatgggtgtgcacgatcatggcagcattgtctgggacgaatttattggtatgtggatcacgctcatggcgctgccgaccaatgactggcagtgggttgccgccgggtttgtgattttccgtattctggatatgtggaagccgtggccgatccgctggtttgatcgcaatgtgcatggcggcatggggatcatgatcgacgatattgtcgccggggtgatttccgcaggcatcctgtattttatcggtcatcactggccgctgggtattctgagctaattgtgcaccgatgcctgatgtgacgcttgtcacgtctcatcaggcctggactcttatttaaatcctacgacaggatgcggtttatacggcgtttccagttcggcaatctgttccggcttcaaagtgatatccaccgcgttcaatagctcatcaagctgttcttcgcggctagttccgataatcggtgcggcaatgcccggtttactcaacaaccaggccagcgcaacttgtgctcgtgtcgcccccagttcttcactgacgcctgttaaccgctctgcgatctgcgcgtcattttcatcgctttctttatagagatttttccccacctcatcagacaccagtcgtgcggtagtttctccccacggacgcgtcagacggccccttgccagcgggctccatggaattaccgccacgccctcctgataacacagtggtagcatctcgcgctcttcttcacgataaatcagattgtagtgatcctgcatactgacaaactgcgcccagccgtgctgtttttggagttccagtgcctgagcaaactggctagcgtgcatactactcgcgccgatataacgcgctttcccggcttttaccacgtcgttgagggcttccagcgtctcttcgatcggcgtgttgtaatcccagcgatgaatttgcaggatatcgacataatccatgccgagacgtcgcaggctgtcgtcgatagagcgcaaaatttgcgcacgggataatccttccggtaaatcaccaacgcgatggaacactttggtcgcaacgaccacgtcttcacgacgggcgaaatcccgcagtgcgcgaccgacgatctcttcgctgctgccgtcagaataactgttggcggtatcaaagaaatttatgccgccttccagtgcacgtttaattatgggacggctgctttcttccggcagtgtccatgcgtgattaccgcgatctggctcgccaaaggtcatacagccgaggcaaagtcgggaaacgcgaaggtcggtttttcctaaggggttgtattgcatgctgccactcctgctatactcgtcatacttcaagttgcatgtgctgcggctgcattcgttcaccccagtcacttacttatgtaagctcctggggcttcactcgtttgccgccttcctgcaactcgaattatttagagtctatgaataatttcttaagcatagcaggagtggagtagggattatgccagccaggccttgattttggcttccataccagcggcatcgaggccgagttcggcgcgcatttcttcctgagttccttgcggaataaagaagtccggcaggccaatgttcagcacgggtactggtttacgatgggccatcagcacttcgttcacgccgctgcctgcgccgcccataatggcgttttcttctacggtgaccagcgcttcatggctggcggccatttccagaattaacgcttcatcaagcggtttcacaaaacgcatatcgaccagcgtggcgttcaggctttcggcgactttcgccgcttctggcatcagcgtaccaaagttaaggatcgccagtttctcgccacgacgcttcacaatgcctttgccaattggtagtttttccagcggcgtcagttccacgccgaccgcgttgccacgcgggtagcgcaccgcactcgggccatcgttatagtgatagccggtatagagcatctggcgacattcgttttcatcgctcggggtcataatgaccatttccggtatgcagcgcaggtaagagagatcaaaagcaccctgatgggtttgaccgtcagcaccaacaatgcccgcgcggtcgatggcgaacaggaccggaagcttttgaatcgccacgtcatgcagcacctgatcataggcgcgttgcaggaaagtggagtaaatcgcgacaatgggtttgtacccaccaatcgccagacccgcagcaaaggtcaccgcgtgttgctcggcaattgccacgtcgaagtagcgatccgggaatttacgactaaactcgaccatgccggaaccttcacgcatcgccggagtaatcgccatcagcttgttgtctttcgctgccgtttcgcacaaccagtcgccaaagattttactatagctcggcaaaccgccgctacttttcggcaaacaaccgctggagggatcaaatttaggcacggcgtggaaagtgatcgggtctttttctgccggttcataaccacgaccttttttggtcatgatatgcaggaactgcgggcctttcaggtcgcgcatgttctttagcgtggtgataagccccagcacatcgtgaccgtccaccgggccgatgtagttaaagcccagctcttcaaacaacgtgccaggcactaccatgcctttaatatgttcttcggtgcgtttgagcagctctttaattggcggcacgccagagaaaacttttttcccgccttcgcgcagactagagtaaagcttaccggaaagcagctgtgccagatggttgttgagcgcgccgacattttcggaaatgctcatttcattgtcgttgagaatcaccagcatatcaggacggatatcgcccgcgtgattcatcgcttcaaacgccatgcctgcggtaatcgcgccatcgccaatgacacagacggtgcggcgatttttgccttctttttcggcagcaaccgcaataccaattccggcactgatggaggtactactatgcccgacgcttaatacgtcatattcgctttcgccgcgccacgggaacgggtgcagaccgcctttctgacggatggtgccgattttgtcgcggcgtccggtcaaaattttatgcggataagcctgatgccccacatcccaaatcaattggtcaaacggggtgttgtagacatagtgcagcgccacggtcagttcgaccgtgcccagcccggaggcgaagtgcccgctggaacggctcacgctgtcgagtaaatagcggcgcagttcgtcgcagagtttcggtaaactctctttcggcaacagtcgtaactcctgggtggagtcgaccagtgccagggtcgggtatttggcaatatcaaaactcatcaggggcctattaatacttattgtttatttattacgctggatgatgtagtccgctagcgcttccagtgcgctggtatcgagactctgttcagccagttgtttcaggctctgacgggcatcgtcgatcagatcccgggctttcttccgggcttgctcaagacccagaagtgcagggtaggtacttttaccaagttgctggtcggcaccctggcgttttcccaacgttgcagtatctcccaccacatccaggatgtcatcctgaacctggaaggcaaggccgatgctctctgcatacttgtcgagtaccggcagagcacgacgtcctttatctccggcgcttaatgcaccaaggcgaacggcggcgcgaatcaatgcgccggttttatgacgatgaatacgctcaagcgcgtccagaggtacgtgtttgccttccgcgtctaaatctaatgcctgaccaccgcacattccggcaataccactggcgctcgccagttcagaaatcatgctaattctgtcgcggtcgctcacttccggcatatcggcatcgcttaaaatgctgaacgccagcgtttgtaaagcgtcgccagcgagaatcgcgtttgcttcgccaaacttcacatggcaggttggcaaaccgcgacgcagatcgtcatcatccattgccggtaaatcatcatgaattaaactgtaagcgtggatacactcaacggcggcagcgggtgcgtccagcgtgtttgtgctaacgccgaacatatgaccggtggcataaaccaggaaaggtcgcaggcgcttaccacctaataatgcgccatactgcatggtttcgaccacgggagtgttctgaaagggcagtggggcgataaaacggctcagcgcctggttggcctgcttaacgcaggcttcgagttgctgcggaaagtccattactcattgtccggtgtaaaaggggttagagaggcgtcttcattgtcagacagcagaatttgtacgcgctgttcggcttgttgtaatttggcctgcccctgacgtgccagctgcacgccgcgttcgaactcgttcagcgcctcttccagcggcaggtcgccactttccagacgggttacaatctgttccagctcgctcagcgccttttcaaagctggcgggcgcctcatttttcttcggcataatgaatgtctgactctcaatatttttcgccccgtcatggtaacggactcagggcaaatagcaaataacgcgcaatggtaaggtgatgtgcacagcaaagcgatgttagtggtatacttccgcgcctggatgcagccgcaggtgtgggctgctgtatttttccctatacaagtcgcttaaggcttgccaacgaaccattgccgccatgaagtttatcattaaattgttcccggaaatcaccatcaaaagccaatctgtgcgcttgcgctttataaaaatccttaccgggaacattcgtaacgttttaaagcactatgatgagacgctcgctgtcgtccgccactgggataacatcgaagttcgcgcaaaagatgaaaaccagcgtctggctattcgcgacgctctgacccgtattccgggtatccaccatattctcgaagtcgaagacgtgccgtttaccgacatgcacgatattttcgagaaagcgttggttcagtatcgcgatcagctggaaggcaaaaccttctgcgtacgcgtgaagcgccgtggcaaacatgattttagcagcattgatgtggaacgttacgtcggcggcggtttaaatcagcatattgaatccgcgcgcgtgaagctgaccaatccggatgtgactgtccatctggaagtggaagacgatcgtctcctgctgattaaaggccgctacgaaggtattggcggtttcccgatcggcacccaggaagatgtgctgagcctcatttccggtggtttcgactccggtgtttccagttatatgttgatgcgtcgcggctgccgcgtgcattactgcttctttaacctcggcggcgcggcgcatgaaattggcgtgcgtcaggtggcgcattatctgtggaaccgctttggcagctcccaccgcgtgcgttttgtcgctattaatttcgaaccggtcgtcggggaaattctcgagaaaatcgacgacggtcagatgggcgttatcctcaaacgtatgatggtgcgtgccgcatctaaagtggctgaacgttacggcgtacaggcgctggtcaccggcgaagcgctcggccaggtgtccagccagacgctgaccaacctgcgcctgattgataacgtctccgacacgctgatcctgcgtccgctgatctcttacgacaaagagcacatcatcaacctggcccgccagattggcaccgaagactttgctcgcacgatgccggaatattgtggtgtgatctccaaaagcccgacggtgaaagcagttaaaagcaagattgaagcggaagaagagaagttcgacttcagcattctcgataaagtggttgaggaagcgaataacgttgatatccgcgaaatcgcccagcagaccgagcaggaagtggtggaagtggaaaccgtcaatggcttcggcccgaacgacgtgatcctcgatatccgttctatcgatgaacaggaagataagccactgaaagtcgaagggattgatgtggtttctctgccgttctataaactgagcaccaaatttggcgatctcgaccagaacaaaacctggctgctgtggtgtgagcgcggggtgatgagccgtctgcaggcgctctatctgcgcgagcagggctttaacaatgtgaaggtatatcgcccgtaatttgtggtttttacgtcgcatctggtcagatgcgacgtttgccgcatccgacattactcgtaataattataaatccctgccgccatcaccagttgacttgccacttcatgggctttttcacgcccaaccaacaggtcgataattttcagaccaaagtcgatagctgtacccggcccctggctggtcagcaattttacccgtgcatcccagacgacgcgcttgtccagccattgttcggcgggaattttgtctttcagcgtcgggaagccggtcatattaccaatcgggaagatatcgtgcggcaccagcacggtggctggcgcggcgcaaatagccgcgacgatacgcccggaacggtggaactgtttaacggtttcaaccagcagagtgctatcgcgaaaacactccgcgcctttaatgccaccaggcagcacgatcacgtcatattcgccatcagccacttcgaccagcggcgcatccgccagcagcttcacgccgcggctgcaggtaatcgccaggttaccatcgctggcgacgctggcagtggtgactttgataccgccgcgaaccagcagatcgatagtggtgacggcttcagtctcttcactaccaggggcgaggcaaaccagtgcgcttgcgctcatattcactctcctttctttttttaattaccaggggcgaggcaaaccagtgccgatgcgctcatattcactctcctttctttttaccatttcaaacaggcgggtgttttccggtacggcaatcccatgcgcgcgggcgcggcgtaagagaaaaccattgatatagtcgatttcagtgtggcgcagcgcgcggatatcctgcaacatgctgctgatattttccgctgtggcatcaatcacctgcatcacgtaatcacgcaaatcttctgcactagtatgatgcccttcgcgttcgatcaccgccgcgacttcttcgcatatctgcataatttcttgcggatgatgacgtaattcaccgttcgggcaattccagatggcagtcagtggattaatcacgcagttgactgccagcttgcgccacagctcggcgcgaatattgttatgccaggcaacgtcaggcaacacggtttgcaaaatatccgccagataactgtaatccccgtcctgttgccgtgccgggccaatatgcgtgataccgtttgccacatgaataatgacattgccgtcgcggcgggctgcatgggtggtggtgcccatcagtaatggctgctgaatgttttgcaactcttcgatggtgcccatgccgttgtgaattaacagtattggcgtagttacaggcagtgtggacgcgaggcttttgacggcatcggaaacctgccatgctttcagcgtcaccaggagcagatcgctggtggcgagaaaatcgggatcgttggcggtcaggctttcgttaaatatgctaccatctgtctcaaccagattcacgctacaataaggttgcggtacgcgcagccagccctgaacttcatgaccctgtttgcaaagtgctgtaagccataattgccctaaggcaccgcatcccaatacggtaattttcattgttcctcctcacccgcaaccactccgggtgttcaataaggctatcccttaattgtgcatgctgttgcgactatgcacaattaagggatacgtcctggtgcaggactgtcggttatttaactttgcgggtattatgcttcgcatcaaaaatgaagggagaggaaaagatgccatctttcgatattgtctctgaagttgatcttcaggaagcacgtaacgcggtcgataacgcgagccgcgaagtggagtcccgttttgacttccgtaacgttgaagccagttttgagctgaacgacgccagcaaaaccatcaaagtgttgagcgagtccgatttccaggtcaatcagttgctggatattctgcgtgccaagctgctgaagcgcggcattgaaggcagtagcctggatgtaccggagaatatcgttcatagcggtaaaacctggtttgtggaagcgaaactgaaacagggcattgagagcgcgacccagaagaaaatcgtcaagatgatcaaagacagcaaactgaaagtgcaggcgcaaattcagggcgatgaaatccgcgtaacgggcaaatctcgtgatgatttgcaggctgtcatggcgatggtacgtggtggcgatctcggtcagccgttccagttcaaaaacttccgcgattaatcgcgactatgtgcgttttgttcatgtcagatgcggcatgaacgcctgattcggcctacaaaggtttgtaattcagaaactttgtaggcctgataagcgtagcgcagcaggcaattcgccgcgttttttatgcctgacgaattgcctgttctatctcaaagcgattcgtcactttgctgtcgattttcacataagcactatgttcttcttctgcaatcaacacttctttgatgccttcagtttctagcaaacgcacttttaacgcctcgtttgcggcaatgttcgccgggatttcaatgcgcaaactgctgacatacggcggttctttcatggtactggcgactgtcagccacactgcggccagcattgcgccagcgagaaataccccctgaccgtcaaacatgccgttaatccagccgcccaggctaccgccaatcgccacgccaagaaactggctggtggagtaaacacccatcgccgtacctttgtaacctgctgggctctctttactgataagactgggcaggagggcttccatcaaattaaacgccacaaagaaaagctgcacgccgaccaccagttgccagaactgcgtttgcgcgttccacaacacaatttccgcaaccacgatcaacccgacgcagaagacaaagacttgcttcattttgcgcttaacttcagcgtagataatgaaaggcacgacgctgccaaaggcgattagcattgtcgccagatagaccttccagtgttcagccgccgggaaccctgcatcagccagttgtccgggcagggcaacaaacgtgctcatcagcaaaatatgcagacacataatgccaaagttgagtttcagcagccgcggttccgccagcactttactgaaactgcctttcaccattccggactcacgattaagtacgtgagtgctactgttgggcacaacccaaatggtcaacgcaatgccggtcgttgccagaatagcgatcatccagaacagcgcgtgcagcccaagtttgtgagtgatgatcgggccaagcaccatcgcaatggcaaaggtaatgccaaagctcacgccgataaacgccatcgctttggtgcggttttgttcgcgcgtgagatcggaaagcagcgccataacggcggcggcaattgctccagagccttgtagcgcccggcccagaataattccccagatggagtcggaaagcgcagcgataacgctaccggcggcaaacaccgccagcccaccgacaattaatggtttgcgaccaatgcggtcggaaagcaggccaaacggaatctgaaaaacggcctgagtcagaccataaataccaatggcaataccgattaatgcttcgctggcaccttgcagagccatgccgtacgtggtcagaaccggcagaaccataaacatgcccagcatgcgcaagctgaatacggtccctaaaccccaggtcgcgcgcctctcacctggcgtcattttataatcgttcattaccacctctgttttaaattcgcgactagtgtaaagcggcaaacgaatggggtaaacatgcggattttttagtaaatatttcgagagggatatgtttctaatgctaagaaaaaaggtgccgtagcacctttttaatagagaggttttgttaccacacagcagccagcagcgtatggctgtccggtaccataaaatcaacggacatcatcacgctgagggcagtgatggcgatgatagagaagccgaacagcttgcgcgcccagattctgtcatcagcaactttataaccgcgcagagccatacctaaccaccagacgctaaccgccgcggcgaccaccagatatttatacccagcgtaaccgccaagagagagcatcagcgtggcaacggcaaaggcgatgatatacagcgtgatgtgattcttcgccacgctaatgccttttaccactggcaataccggaatgtttgccgcctggtaatccttaaagcggaaaatggcgatggcataggagtgaggcatctgccacaggctgaagatagccagcaggatcgctgcgccgctatcgaactcaccggttaccgcacagtagccgatcaccggcggcgcagcgccggagaggctaccaatcaacgtgccgtagacagagtggcgtttcatgtacaggctataaacgccgacataaaccacaaagcccatcacccccagccagcaggccagcggattcgcgccaaaccacagcagcataaagccagcaatacccagcaacgtggcgtacaccaggctgacagcaggagagatcaggcctttcaccagcacccgattcttcgtcctttccatctttctgtcgatatccctgtcgatgtagttgttaaacacacaaccgctcgccacaaccagactcaccccaaccagcgtgtagataaacaggggataatcaatgctgcccttactggccagcaggaatcccccaatcacgctgatcaggttgccaaagatgatgcctggtttcgttacttgcaggtattgcttaaacatcataaccgccgctcttagtgcatcatcatgttgtagttgaggttccacataatccagatggagcctacaaccaggatagcgatgattagcacggtgaagacaaacgccgtcatgttccagccttcatcacttttggtattcatgtgcaggaagcacaccagatgcaccagaacctgtaccactgccattgccaggattgttcccagaattacggccggagaggcagctcctgtcatcaccatccagaacggaatcaccgtcagaatgatgctcaggataaagcctgtcatgtaggtttttacgctgccatgggacgcgccgctgtgatcggtagaatgactcattacatcgccccccatcagataaacaacagtgaacacacagatccaaaccacatccaggaagtgccagaacaggctcaggcacatgatgcgggtacggttagtgctggtcaggccgcgacgggcgatttgcaccatcagcaccgccatccagataagaccagaagtgacgtgcagaccgtgcgtgccgaccagcgcaaagaacgcactcaggaagccgctgcgatccggacccatgccgttaacaatcaggtgatggaattcatagatttccatcccgataaatccggcaccaaacaaccaggtcaacgccagccaggagataacctggcttttgttgtttttgtacatggcgatagccgccatgccgtaggtgatggagctgaacaacagcaagaaagtttcaaccagaacgaacggcagttcgaaaatgtccttacctgtcgggccgcctgcggtgccgttcaccagaacggcataggtagcaaacaagatagagaacagaatgcagtcgctcatcaggtagatccaaaatccgaagattttggttccgcctgcatcgtggtgcccgtgttcgtgcgcgtgggcagtcgcgtgcgtcaaagtatcagttgccatttttcagccctgccttagtaatctcatcgaaatgctggttttccagtttttcgatttctgccaccggcacgtagtaatccacgtcctcgtcgaagcttttcacgatccaggtgatgatcatgcctgcgaagccaacaatcgccagccaccagatatgccagatcatggcgaaaccgaagatggtggagaaagctgcaatgacgatacctgcaccgctgtttttcggcatatgaatttcttcatagtggtcaggctttttatacgcttcgcctttctctttcatttcccagaatgcatcacgttcgtgaacgtgcggcactacggcaaagttatagaacggaggcggggaagaggttgcccactccagcgtacggccaccccacgggtcgccagtcaggtcacggttctggtcgcggtcgcgaatagaaacgtacatctgaataacgaggcagagaatacccagcgcaatcagtactgcaccgctggctgcaatcatcagcatggtgtggaactgcgggtcaatctgctggctcaaacgacgggtcatgcccatgaagcccagcgcatacagtggcataaaggcaacgaagaagccgatgatccagaaccagaacgcgcgtttaccccaggtttcgttcagtttgaaaccgaacgctttaggccaccagtaggtcatccctgcgaagcagccgaagaccacgccgccgatgatcacgttatggaagtgcgcaatcaggaacaggctgttatgcagaacgaagtccgcgcccggtacggccagcagcacgccagtcatcccgcccacgctgaaggtgacgataaaaccgatggtccacagcatcgcagaatggaacacgatgcggccctgatacatggtgaacagccagttgaagatcttcaccccggtcgggatggcgataatcattgtggtgataccaaagaaggcgtttacgttcgcgcccgcacccatcgtaaagaagtggtgcagccaaacgatgaagctcagcacggtgatacagacggttgcccataccaggctggtataaccaaacagacgtttacggctgaaggttgccgcaatttcggagaacacaccgaaaacaggcaggatcaggatgtaaacttccgggtggccccaggcccaaatcaggttgatgtacatcatcatgttgccacccatatcgttggtaaagaaatgggtgcccagatagcgatccagggtcaacaacgcgacggtaaccgtcagaattgggaaggaagcaataatcagtacgttcgcgcacagacttgcccaggtaaatactggcatcttgaacatggtcatgcccggtgcgcgcatcttcagaatggtaacgaagaagttgataccggtaagcgtcgtacctataccggatagctggagactccatatccagtaatcgacaccgactcccggactgtactctattccgcttagcggtggataggccagccagccggtctgcgcaaattcgcccacgccgagagaaacgttaaccagaatcacaccaacaacggtaaaccagaagcttaagttgttgaggaacgggaacgcaacgtcacgcgcgccgatctgcagcggaaccaccaggttcatcagaccgataacgaaaggcatcgccacgaagaagatcataatcacgccgtgcgcggtaaagatctgatcgtagtggtgaggtggcaggaagcccgcttcgcccgcgctggcaagagcctgctggctacgcatcataatggcgtcagcaaaaccacgcagcaacatcacaatcgccacgatgatatacatgataccgaggcgtttatggtcgacggaggtcagccactctttccacaggtaggtccacttaccgaagtaagtgatcaggccaacgagcgccagacctcccaaaataatgccagcgatcgtaaccatgacgataggttcatggaacgggactgcatcaagacttaattttccgaacatctttattcttcctcaacccctttaatgggcggattccgcgtggctcatgtccatgccttccataccttcgtgtgcgctgtgctcaccttctggctgggtcatgtccatgctcttaccgtgagccataaacttgttaattacatcggcaaacaagtctggtttcacgttggagaaatattccacctggttgtattcgctaggcgcggccagtttttcgaacgcagccatgtcagacatggtgttcgggctctgcttcgcttttgcgacccactggtcgaatgcggcgcgatccggtgttgcaatagctttgaacttcatgccactgaagcccgggccgctgtagctggcggagataccgtcataagtgccgggttcgttggcgatcagatgcaggcgagtctgcataccggccatggcataaatctggctacccagacgcggaatgaagaaggagttcatcacggagttggaggtcactttgaagtacaccggagtgttcgccgggaaagcgatttcattcacggtagcaatgccctgttccgggtagatgaagaaccatttccagtccatggaaaccacttcgatggtaatgggcttctcgtcgtgtgccagcggcttgctaggctcaagagcgtgagtggttttccaggtcagtactgcaaggaagatgatgattaagataggtaccgtccagaccacagcttccactttattggagtgactccagttcgggctgtacttagcatctttattgctcgcacggtacttccaggcgaaaccaacagccatcaagattgcgggaataacgacaatcaacatcaggccaaatgccgtcagtatcagactacgttgctccagaccaatctgtcctttgggatctaacagcgcagaattacagccactgagcaatacagtgcctgcaaataaactcaaccatcccaaacttttattgtatttcctgagtctcatttaacgacctcaattccacgggatctggtggcgtttaaagtgtgtgggcattttacgggaaggttacattactgtaaacatgattaaattcctgttacttggatttggctgccaggtcacatatgttgcaaaacatatcaggttgattttaagaagctgttgcaaaagggcgttataacaaaaggggagtgctgaaggagtctgggcgggcaattggtataaccaatgtgaaataaaacaattatttaacaaataattatcattagagtgacaactgggtgatgagaaaataaagactcattagctgaatcgtgtaagaaaaatagaatttataaatggcgccaataatttccaaacgctaagccgcacaaaagaacaaatattaataagcgatactgatgtttatttagccgtaataattacggcgagtgattactacagctaaataatatttacagattacgtcagatgcgtttttcgtagcgccagataatccagcaaaccaccaagcacgacgccagaaagggcgactaaaaccccgacttccagcagagcaggcaggaaagagaagtgcgtcaaatccagcgcgtccatcgtcaatagcagtaaccacacggccaacaggctgacgcccgccgccagtgtccacatggcaaaggcataacctgccggatatgcggtacgggagataaagttgtcatttactcgtgtatattcaagcgtctggcggcaaaccagcagcaaaataagccctggtacggcagcggcgacggagaatagatagaatgtgctccagccgtgtgcttcaacaaaccaacccgccacggggccgacataaactcgccctacagcagaaagcgcactgagcagggcaaattgagtagcggaaaaactcttattacatagcgtcattaacagcgcgacaaaggcacttgtgcccatcccgccacagaggttttcgaaaaagacggctgcgcccatgctgtagagatgcttatcagtaatgctcagcagccagtaaccggcgttagacgcaccttgtaaaatgccgaaaatcagcagtgcccggaacagactcaggcgctgcatcaaaatcccaccgtacaatgcgccaacaatggtcgctagtaagccaagcgttttgttaaccacgcctacttcacccgcatcaaacccgacgccgcgaatcaaaaacgtggttgtcaggctcatggcgaatgcgtcgcccagcttatacagcacgataagaagcaaaataagccaggcattattgcgaccaaagaaatctcgcagaggtgcaacaaccgcttgttccagcgttttgggcacaggaatggtgtcggttggttctggtgcaagcaacgtcgcgataatacaggggatcaacagtgccgccattaaccagtacatgccctgccagcccagccatttatctgccagccacagggctaggccgccggaaaccagcatccctaaacggtaacccagcacgctgattgccgcgcccgcaccacgttcttctgccggaagcacatcggttttccacgcatcgaagactatatcctgggaagcagagcaaaaagcgatcaccactgccagcgccgccatccagcggagttgggtgcctggttcgagaaaacccatcgccgcaatggcgactaataacaggatttgcgtggcgagcagccaaccgcgccgccgcccaaaaaatggaggcgtgtagcggtccatcagcggactccagaggaatttaaaaacgtaagcctggcctaccagagagaagaaaccaatggttttgagatcgatattctcgaccgtcatccaggcctgtaaggtaccggatgtcagggcgagcggtagcccggaagcaaaacccaggatcagcaatatggcactacgcggctgttgaaaaatacgtaaatattgactggacatgggcgtctacaggcccggcttgcaccgggccagagggcagaaattaacgcgcgttctgcttgatgaattcgtggatgctggtgtcctgagacatatcagcgatggtatcggtcagcacactgttaaccgcatcggcgatatttttgttggaggcctggaacgcaccttcaacgttgtagctggcacgatagtttttggtcattttgttgccattctgcgcggtagcgatgatggcgatatccgctttggtcgcgatgttgtagcgcacgttgccctgggacacgtcagcatacagttggctaacgatgatttgcagattaaccgggccattcggaccaaccatgtaaccacgcgcggtcatctgtttttccagcacttcttgcagcaggaaacgcagatcgcgggaggcggtcagggtaacgatttgattatcgcgggtgacttttgccagcgcctgatcggtacgctgatcggcaccattaatgcttacggtgacgcccatcaggcttggatcctgctgtggcagtgtaatcgtcggggaaacttcaatagttgttggcggttttgcgcatcctgcaagcataaacagagcaactaacgggaagaggatttttttgaacatgttcgggctctcagagactcttaagcgtgtttggtaaaaattcccgccatcataacattgccaacggcgaggggaagtgggtaaggcatgtaaattcatcatgttgacgaaataatcgcccctggtaaaagaaacactgatgcgaggcctgtgtttcaatctttaaatcagtaaacttcatacgcttgacggaaaaaccaggacgaaacctaaatatttgttgttaagctgcaatggaaacggtaaaagcggctagtatttaaagggatggatgacatctcagcgttgtcggaggagatatttcatgatgatacgtgagcggatagaagaaaaattaagggcggcgttccaacccgtattcctcgaagtagtggatgaaagctatcgtcacaatgtcccagccggctctgaaagccattttaaagttgtgctggtcagcgatcgttttacgggtgaacgttttctgaatcgtcatcgaatgatttacagtactttagcggaggaactctctactaccgttcatgcgctggctctgcatacttacactattaaggagtgggaagggttgcaggacaccgtctttgcctctcctccctgtcgtggagcaggaagcatcgcgtaaaaacgcatttgcaactgtcggcgcttttccagtatgttgctaaagattttatgaaaaacggcctgcgggccgttttgttttgtctggattttgcgctttttgcccagcattcagacgaaaattgcccgggaattgtgaaaaaatacgcgacagcgcgcaataaccgttctcgactcataaaagtgatgccgctataatgccgcgtcctatttgaatgctttcgggatgattctggtaacagggaatgtgattgattataagaacatcccggttccgcgaagccaacaacctgtgcttgcggggtaagagttgaccgagcactgtgattttttgaggtaacaagatgcaagttagtgttgaaaccactcaaggccttggccgccgtgtaacgattactatcgctgctgacagcatcgagaccgctgttaaaagcgagctggtcaacgttgcgaaaaaagtacgtattgacggcttccgcaaaggcaaagtgccaatgaatatcgttgctcagcgttatggcgcgtctgtacgccaggacgttctgggtgacctgatgagccgtaacttcattgacgccatcattaaagaaaaaatcaatccggctggcgcaccgacttatgttccgggcgaatacaagctgggtgaagacttcacttactctgtagagtttgaagtttatccggaagttgaactgcagggtctggaagcgatcgaagttgaaaaaccgatcgttgaagtgaccgacgctgacgttgacggcatgctggatactctgcgtaaacagcaggcgacctggaaagaaaaagacggcgctgttgaagcagaagaccgcgtaaccatcgacttcaccggttctgtagacggcgaagagttcgaaggcggtaaagcgtctgatttcgtactggcgatgggccagggtcgtatgatcccgggctttgaagacggtatcaaaggccacaaagctggcgaagagttcaccatcgacgtgaccttcccggaagaataccacgcagaaaacctgaaaggtaaagcagcgaaattcgctatcaacctgaagaaagttgaagagcgtgaactgccggaactgactgcagaattcatcaaacgtttcggcgttgaagatggttccgtagaaggtctgcgcgctgaagtgcgtaaaaacatggagcgcgagctgaagagcgccatccgtaaccgcgttaagtctcaggcgatcgaaggtctggtaaaagctaacgacatcgacgtaccggctgcgctgatcgacagcgaaatcgacgttctgcgtcgccaggctgcacagcgtttcggtggcaacgaaaaacaagctctggaactgccgcgcgaactgttcgaagaacaggctaaacgccgcgtagttgttggcctgctgctgggcgaagttatccgcaccaacgagctgaaagctgacgaagagcgcgtgaaaggcctgatcgaagagatggcttctgcgtacgaagatccgaaagaagttatcgagttctacagcaaaaacaaagaactgatggacaacatgcgcaatgttgccctggaagaacaggctgttgaagctgtactggcgaaagcgaaagtgactgaaaaagaaaccactttcaacgagctgatgaaccagcaggcgtaatttacgcagcataacgcgctaaattcgcacaaaggcccgtcaccgccaggtggtgggcttttttttgtcatgaattttgcatggaaccgtgcgaaaagcctctttcggtgttagcgtaacaacaaaagattgttatgcttgaaatatggtgatgccgtacccataacacagggactagctgataatccgtccataaggttacaatcggtacagcaggttttttcaattttatccaggagacggaaatgagttacagcggcgaacgagataactttgcaccccatatggcgctggtgccgatggtcattgaacagaccagtcgcggtgagcgctcttttgatatctattctcgtctacttaaggaacgcgtcatttttctgactggccaggttgaagaccacatggctaacctgattgtggcgcagatgctgttcctggaagcggaaaacccagaaaaagatatctatctgtacattaactccccaggcggggtgatcactgccgggatgtctatctatgacaccatgcagtttatcaagcctgatgtcagcaccatctgtatgggccaggcggccagcatgggcgctttcttgctgaccgcaggggcaaaaggtaaacgtttttgcctgccgaatagccgcgtgatgattcaccaaccgttgggcggctaccagggccaggcgaccgatatcgaaattcatgcccgtgaaattctgaaagttaaagggcgcatgaatgaacttatggcgcttcatacgggtcaaagtttagaacagattgaacgtgataccgagcgcgatcgcttcctttccgcccctgaagcggtggaatacggtctggtcgatagcattctgacccatcgtaattgatgccagaggcgcaactgtgccgctatacttatccagggcggcacaacgctgtaagcggcttgcgcctgagaatggcatttgcgtcgtcgtgtgcggcacaaagaacaaagaagaggttttgacccatgacagataaacgcaaagatggcagtggcaaattgctgtattgctctttttgcggcaaaagccagcatgaagtgcgcaagctgattgccggtccatccgtgtatatctgcgacgaatgtgttgatttatgtaacgacatcattcgcgaagagattaaagaagttgcaccgcatcgtgaacgcagtgcgctaccgacgccgcatgaaattcgcaaccacctggacgattacgttatcggccaggaacaggcgaaaaaagtgctggcggtcgcggtatacaaccattacaaacgtctgcgcaacggcgataccagcaatggcgtcgagttgggcaaaagtaacattctgctgatcggtccgaccggttccggtaaaacgctgctggctgaaacgctggcgcgcctgctggatgttccgttcaccatggccgacgcgactacactgaccgaagccggttatgtgggtgaagacgttgaaaacatcattcagaagctgttgcagaaatgcgactacgatgtccagaaagcacagcgtggtattgtctacatcgatgaaatcgacaagatttctcgtaagagtgacaacccgtccattacccgagacgtttccggtgaaggcgtacagcaggcactgttgaaactgatcgaaggtacggtagctgctgttccaccgcaaggtgggcgtaaacatccgcagcaggaattcttgcaggttgatacctctaagatcctgtttatttgtggcggtgcgtttgccggtctggataaagtgatttcccaccgtgtagaaaccggctccggcattggttttggcgcgacggtaaaagcgaagtccgacaaagcaagcgaaggcgagctgctggcgcaggttgaaccggaagatctgatcaagtttggtcttatccctgagtttattggtcgtctgccggttgtcgcaacgttgaatgaactgagcgaagaagctctgattcagatcctcaaagagccgaaaaacgccctgaccaagcagtatcaggcgctgtttaatctggaaggcgtggatctggaattccgtgacgaggcgctggatgctatcgctaagaaagcgatggcgcgtaaaaccggtgcccgtggcctgcgttccatcgtagaagccgcactgctcgataccatgtacgatctgccgtccatggaagacgtcgaaaaagtggttatcgacgagagcgtaattgatggtcaaagcaaaccgttgctgatttatggcaagccggaagcgcaacaggcatctggtgaataattaaccattcccatacaattagttaaccaaaaaggggggattttatctcccctttaatttttcctctattctcggcgttgaatgtgggggaaacatccccatatactgacgtacatgttaatagatggcgtgaagcacagtcgtgtcatctgattacctggcggaaattaaactaagagagagctctatgaatcctgagcgttctgaacgcattgaaatccccgtattgccgctgcgcgatgtggtggtttatccgcacatggtcatccccttatttgtcgggcgggaaaaatctatccgttgtctggaagcggcgatggaccatgataaaaaaattatgctggtcgcgcagaaagaagctagtacggatgagccgggtgtaaacgatcttttcaccgtcgggaccgtggcctctatattgcagatgctgaaactgcctgacggcaccgtcaaagtgctggtcgaggggttacagcgcgcgcgtatttctgcgctctctgacaatggcgaacacttttctgcgaaggcggagtatctggagagcccgaccattgatgagcgggaacaggaagtgctggtgcgtactgcaatcagccagttcgaaggctacatcaagctgaacaaaaaaatcccaccagaagtgctgacgagcctgaatagcatcgacgatccggcgcgtctggcggataccattgctgcacatatgccgctgaaactggctgacaaacagtctgttctggagatgtccgacgttaacgaacgtctggaatatctgatggcaatgatggaaagcgaaatcgatctgctgcaggttgagaaacgcattcgcaaccgcgttaaaaagcagatggagaaatcccagcgtgagtactatctgaacgagcaaatgaaagctattcagaaagaactcggtgaaatggacgacgcgccggacgaaaacgaagccctgaagcgcaaaatcgacgcggcgaagatgccgaaagaggcaaaagagaaagcggaagcagagttgcagaagctgaaaatgatgtctccgatgagcgcagaagcgaccgtagtgcgtggttatatcgactggatggtacaggtgccgtggaatgcgcgtagcaaggtcaaaaaagacctgcgtcaggcgcaggaaatccttgataccgaccattatggtctggagcgcgtgaaagatcgaatccttgagtatcttgcggttcaaagccgtgtcaacaaaatcaagggaccgatcctctgcctggtagggccgccgggggtaggtaaaacctctcttggtcagtccattgccaaagccaccgggcgtaaatatgtccgtatggcgctgggcggcgtgcgtgatgaagcggaaatccgtggtcaccgccgtacttacatcggttctatgccgggtaaactgatccagaaaatggcgaaagtgggcgtgaaaaacccgctgttcctgctcgatgagatcgacaaaatgtcttctgacatgcgtggcgatccggcctctgcactgcttgaagtgctggaaccagagcagaacgtagcgttcagcgaccactacctggaagtggattacgatctcagcgacgtgatgtttgtcgcgacgagcaactccatgaacattccggcaccgctgctggatcgtatggaagtgattcgcctctccggttataccgaagatgaaaaactgaacatcgccaaacgtcacctgctgccgaagcagattgaacgtaatgcactgaaaaaaggtgagctgaccgtcgacgatagcgccattatcggcattattcgttactacacccgtgaggcgggcgtgcgtggtctggagcgtgaaatctccaaactgtgtcgcaaagcggttaagcagttactgctcgataagagtttaaaacatatcgaaattaacggcgataacctgcatgactatctcggtgttcagcgtttcgactatggtcgcgcggataacgaaaaccgtgtcggtcaggtaaccggtctggcgtggacggaagtgggcggtgacttgctgaccattgaaaccgcatgtgttccgggtaaaggcaaactgacctataccggtagcctcggcgaagtgatgcaggagtccattcaggcggcgttaacggtggttcgtgcgcgtgcggaaaaactggggatcaaccctgatttttacgaaaaacgtgacatccacgtccacgtaccggaaggtgcgacgccgaaagatggtccgagtgccggtattgctatgtgcaccgcgctggtttcttgcctgaccggtaacccggttcgtgccgatgtggcaatgaccggtgagatcactctgcgtggtcaggtactgccgatcggtggtttgaaagaaaaactcctggcagcgcatcgcggcgggattaaaacagtgctaattccgttcgaaaataaacgcgatctggaagagattcctgacaacgtaattgccgatctggacattcatcctgtgaagcgcattgaggaagttctgactctggcgctgcaaaatgaaccgtctggtatgcaggttgtgactgcaaaataatgacctcgcgcaaaatgcactaataaaaacagggctggcaggctaattcgggcttgccagcctttttttgtctcgctaagttagatggcggatcgggcttgcccttattaaggggtgttgtaaggggatggctggcctgatataactgctgcgcgttcgtaccttgaaggattcaagtgcgatataaattataaagaggaagagaagagtgaataaatctcaattgatcgacaagattgctgcaggggctgatatctctaaagctgcggctggccgtgcgttagatgctattattgcttccgtaactgaatctctgaaagaaggggatgatgtagcactggtaggttttggtacttttgccgttaaagagcgtgctgcccgtactggccgcaacccgcagaccggtaaagagatcaccatcgctgctgctaaagtaccgagcttccgtgcaggtaaagcactgaaagacgcggtaaactaagcgttgtccccagtggggatgtgacgaagttcaagggcgcatctactgatgtgccttttttatttgtattcggtgactttctgcgtcttgtgggctgacaattgcccccgtttcttgtcacaataggcctttgcgcgcatcgatacgttgcgtgaggtacacagtcatctacagcggagtgttgttacaccatgatggacagcttacgcacggctgcaaacagtctcgtgctcaagattattttcggtatcattatcgtgagcttcatattgaccggcgtgagtggttacctgattggcggaggcaataactacgccgcaaaagtgaatgaccaggaaatcagccgtgggcaattcgagaacgccttcaacagcgagcgtaatcgcatgcagcaacagctgggcgatcaatactccgagctggcagcgaacgaaggctatatgaaaaccctgcgtcaacaggtgctgaatcgtctgatcgacgaggcgctgctggatcagtacgcacgtgagctgaaactgggtatcagcgatgagcaggttaaacaggcgattttcgcgaccccagccttccaggttgacggcaaatttgataacagccgctataacggtatcctcaaccagatggggatgaccgccgatcagtacgcccaggcgctgcgtaaccagctcactacccaacagctgattaacggcgttgccggtaccgattttatgctgaaaggtgaaaccgacgagctggcggcactggtcgcgcaacaacgcgtggtgcgtgaggcgactatcgatgttaacgcgctggcggcgaagcagcctgtgaccgaacaggagattgccagctactacgaacaaaacaaaaacaatttcatgacgccggaacaattccgcgtgagttacatcaagctggatgccgcaacgatgcagcaaccggttagcgatgcggatatccagagctactacgaccagcatcaggatcaattcacccagccgcagcgtacccgctacagcatcatccagaccaaaactgaagatgaagcgaaagcggtacttgatgagctgaataaaggcggtgattttgctgcattagccaaagaaaaatctgccgatattatctctgctcgtaacggcggcgatatgggttggttagaagatgccactatcccggacgaactgaaaaatgctggtctgaaagaaaaaggccaactgtctggtgtcatcaaatctagcgtcggtttcctgattgtacgtctggacgacattcagccagcgaaagtgaaaagcttagacgaagtacgtgacgacattgcggcgaaagtgaaacacgaaaaagccctcgatgcgtactacgcgctgcagcagaaagtgagcgatgcggcaagcaacgacaccgagtctctggccggtgcagagcaagctgccggcgttaaagccactcagacgggttggttcagcaaagataacctgccggaagagttgaacttcaagccggttgccgacgctatctttaacggcggtctggtaggtgaaaacggcgcgccgggcatcaactctgacatcatcaccgtagacggcgaccgcgcattcgtgctgcgcatcagcgagcacaaaccggaagcggtgaaaccgttggcagatgttcaggaacaagttaaggcattggttcagcacaacaaagctgaacaacaggcgaaagtggatgctgagaaactgctggttgatttgaaagccggcaaaggtgcggaagctatgcaggctgccggtctgaaatttggcgagccgaaaaccttaagccgttccggtcgtgacccgattagccaggcggcgtttgcactgccactgccagcgaaagacaaaccgagctacggtatggcgaccgatatgcaaggtaatgtggttctgctggcgctggatgaagtgaaacaaggtagtatgccggaagatcagaaaaaagcgatggtgcagggtatcacccagaacaacgcacaaatcgtctttgaagctctgatgagtaacctgcgtaaagaggcgaaaatcaaaattggcgatgcgctggaacagcaataatcctgaagccgcctcgcaaaaaaatgcgttgcagctgtaacaagaaaaggtcgctttcgcggccttttccatttctgaacattgccatttgtttactgttttcactgccgttaaggtgattccactgttaacaaacaaggagaaaacagtatgaaacacggaattaaagcactgctcattaccctgtccctggcctgtgccggaatgtctcatagcgcgctggcggcagcttctgtggcgaaaccgacggcggtagaaaccaaagcggaagctcctgcagcacaaagtaaagcagcagtaccggcgaaagccagtgacgaagaaggcacccgggtcagcattaataatgccagcgcggaagagctagcccgcgcgatgaatggcgttggcctgaagaaagcgcaggcgattgtcagttatcgcgaagagtacggtccgtttaaaactgtggaggatctaaagcaggtgccggggatgggcaatagcctggtggaacgtaatctggcggtattaaccctgtaattaatttgcatagtggcaattttttgccagactgaagaggtcataccagttatgacctctgtacttataacaacaacgtaaggttattgcgctatgcaaacacaaatcaaagttcgtggatatcatctcgacgtttaccagcacgtcaacaacgcccgctaccttgaatttctcgaagaagcccgctgggatgggttggaaaatagcgacagttttcagtggatgacggcccataacatcgccttcgtcgtggtcaatatcaatattaactatcgtcgcccagcggtattaagtgacctgttaactattaccagtcagttgcagcaattaaacggtaaaagcggcatcttaagccaggtcattacactggagccggaagggcaggtggtagcggatgcgcttattacgtttgtttgtattgatcttaaaacgcagaaagcattagctctggaaggggaattgcgcgaaaagctggagcagatggttaagtaaacgttttgtggtgccggatgctcaagccgcatccggcgacacccggaataattacctcaacccggttttctgcttcatcgctgccatcaccgtcggtttatcggccagataatgattcaaaccgttggcgcgtaaattacatgccgcacaatgaccgcaaccgtcgcctttaaagccgttatagcaggtcaacgtttcgttacggactaaatccagtttgccgtaataatctgccagcgcccaggtttccgctttatcaatccacatcagcggcgtttcaaaacgaatatctttcgccatgcccaaactgacggcatggtttagtgctttcacaaactcatcgcggcaatccgggtagccggagaaatccgtttcgcagacgccagtaattacggcttctgcttttacctgatacgcatatattgccgccagcgtcaggaacaaaatattacgccctgggacaaacgtattcgggataccatcggcttcaggttcataatcaggcaccggaatgctgtcacgcgtcaggctactgaccgccagctcgttgagcagggtgacatccagcaccttatgcgcgcgtgcccccagtttcagcgccagttcgcgtgccacgtcgatttctgcgcgatgccgctgaccgtaatcgaacgtcacgcaatggacttcatcatattgttgtaatgcctgcaccagacaggtggtggaatcctgacctccactgaacacaacgacagcacgtttcatagataatcctgcttgaacaataaaagcgttatggtaacgcctgcgattaacccggaccagctattcattggcttggcgcgggaagccaggcttcggtaaattcaaaccagccgcgcggtgtcagtcgcacaccgttcacgccgggaggggcactaatgcgatagtgatagttgaacagcggcgtcagcgtcgcatctgtcattaactggctaaaaaccgctttcagggcattaaatcggttttcttcatcaggcattatttgcacggcatccagtgtgctttgtagatgtgcgtatgctggagcgtcgaaaacatgtggccacagcggatcgcagcgcagccattgctccagagtatattccggtgcttcgccaattaatctgtcgcccatcatgaggtctgcgtgtgcctgtagggtcgtgtcgtcccagttttttgcgttatgaaaaataattgtgagttcacagccttccgctgccagtgtcgcctgtaggcgttctgccatggtatgaagttctatcggtaggtgataaaccagcgtcaaggttttcggtagtttgacttcatccggtacctgccaatgcggaatagtccagcctggcagtaatgcatgactggcggtgatcaggttttctccgacttctaacgtttgtaataaaccggattgatgaataatggagatcacttttcgcgcctgccagagggagagtcggggacttttgcgcaacgtcaaatagcaaaaacctaaactgatgccgctactgacctggctgacccgttgcagctcctccggtttgccgatggtgatttgcacgggatgccgacaactggttcccaaatctttttcgaaaagcggcggagttatccagtactcaaccgctttaagcagcggatgacgtaaatggtaataatcatggctttccaggcgcaccagctctgctgtgaattgtgttaagcgaaaaggacccgtgccgatcagtgggaattgcggatgcgccagatggctgcaatagctcgccagccggtgcgcaagccagtaatcagggcgatgtaaaaagaaggtcagacactgcggatgggtgacttcaatacgcttcacgctaataaataattgatccagtgctggcagttgtaacagcatcaataatcgctggtgtaagtgactggcttttactgcatcgccgttatgccagtgtagggtactacgaagataaaagtcccagcgtaacccgtcagtagaggtttcccagtgatgcgctaaatcgccaatcgggcgctgagtattattatcgaagcgggtcaggccggaaaatatctgcccggcgagatgctgctcggcacggccgggcaaaaagcctggttgtagcggttcgagcgggcgatagtagggaatacgcaacgtgggtgtatcgttttgccattgtccgcccataaacggctgtaacagagtgcgcagctcacctggggccagttgcgccagctccagcacatcttgctgctttccggtttccagtgcctgttccatcatcgcattgcgtaggctttccggcgtgaccagaaagcgtaattgtccgcgctttccgcgtccactctgcgcctgccactccagccatcccgcctcctgtgcctgacgcaacagcgtacgaacatggcgttcgctgcaaaaacagcgttcggccagttcgctgacggtgacggtttgcggctttccggcggaaggttgccacagacgttgatactggttaagacggttgagcaatcgcatataaacccggaacaatattatttaactattcactattacttccgtatatatcaggtgatactcaatcaccattaaccgtgtcacagagtggagaaagaaatggctcgtctggcagcatttgatatggatggcactttattgatgcccgaccatcatttaggtgagaaaaccctctctactttggcgcgactgcgtgaacgcgacattaccctcacttttgccacggggcgtcatgcgctggagatgcagcatattctcggggcgctaagcctggatgcgtatttgattaccggcaacggaacgcgcgtgcattctctggaaggtgaacttttacatcgtgatgatttacctgcggatgtcgcggagctggtgctgtatcagcaatgggatacccgagccagcatgcatatcttcaatgacgacggttggtttaccgggaaagagatccctgcgttgttgcaggcatttgtctatagcggttttcgttatcagataatcgatgtcaaaaaaatgccactcggcagcgtcaccaagatctgcttctgtggcgatcacgacgatcttacacgcttgcagatccagctatacgaagcattaggcgagcgtgcacatttgtgtttttccgccacggattgcctcgaagtgctgccggtgggctgcaataaaggcgctgcattgacggtgctgacccaacatttaggtttaagcttgcgcgattgcatggcctttggtgatgcgatgaacgatcgcgaaatgttagtcagcgtcggtagcggatttattatgggcaatgcgatgccgcaactgcgcgcggagctcccgcatttaccggtgattggacattgccgaaatcaggctgtctctcactatttgacgcactggctggactatccacatctaccttattcccccgaataacgagatcccttccagcaccgggcaattgcccggttttttttgcgttgaatttgtcattttgtgccgtggtgtttaaaccgcacagaataaattgtcgtgatttcacctttaaaataaaattaaaagagaaaaaaattctctgtggaagggctatgttagataaaattgaccgtaagctgctggccttactgcagcaggattgcaccctctctttgcaggcactggctgaagccgttaatctgacaaccaccccttgctggaagcgcctgaaacggctggaggacgacggtatccttatcggcaaagtcgccctgctggatccggaaaaaataggcctcggcctgaccgcttttgtgctgataaaaacgcaacatcacagcagcgaatggtattgccgctttgtcacggtggttaccgaaatgccagaagtgctggggttctggcgcatggctggtgaatacgattatctgatgcgcgtccaggttgccgacatgaaacgctacgacgagttttataagcgtctggtaaacagcgtgccggggctgagcgacgtcacttccagcttcgcgatggaacagattaaatacaccacttctttacccatcgaataaatatccagaatcaggtcaggacacaacgcgtgcgattatttgctcaattaagctggtatttccgtcgggaatggcgtcgctatctcggggctgtcgccttgcttgtcattatcgcgatgctgcaactggttccgccaaaagtggttggtattgttgtcgatggcgtgacagaacaacactttactaccgggcagatcctgatgtggatcgccaccatggtgctgattgccgttgtggtttatctcctgcgttacgtctggcgggtattgctgtttggtgcgtcttatcaactggctgttgaactgcgtgaagattattaccgtcagctaagccggcagcatcctgagttttacctgcgtcatcgcaccggtgacctcatggctcgtgcgaccaatgacgtcgatcgcgtcgtgtttgccgccggagaaggggtgctgacgctggtggatagtctggtgatgggctgcgctgtgttgattatgatgtctacgcaaattagctggcagttgaccttattttccctgttgccgatgccagtgatggcgatcatgattaagcgcaacggcgatgctttgcatgaacgctttaagctggcacaggcggcgttttccagtcttaatgaccgcacccaggaaagcctcaccagtatccgcatgatcaaagcctttggtctggaagatcgccagagcgcgttatttgccgcggatgccgaagataccggcaaaaaaaacatgcgggtggcgcgtattgatgctcgtttcgacccgaccatctatatcgcgattggtatggcgaacttgctggcgattggcggcggtagttggatggtggtgcagggcagtttaacgctgggccagctcaccagttttatgatgtatttaggtctgatgatttggccaatgctggcgctggcatggatgtttaacattgtggaacgtggtagtgctgcgtacagccgtattcgcgcgatgctggcggaagcgccggtggtgaacgatggtagcgaacccgtgccggaagggcgtggcgaactggatgtaaatattcaccagttcacgtatccgcagactgaccatcctgcgctggaaaacgtcaatttcgccctgaaacccggtcagatgctgggtatctgcgggccgactggttccggcaaaagtaccctgttgagcctcattcagcgtcatttcgacgtcagcgagggggatattcgctttcatgatattcctctgacgaagttacaactcgatagctggcgtagccgcctggcggtagttagccagacgccattccttttttctgacactgtggcgaataacatcgcgctgggttgcccgaatgccacccagcaagagattgagcatgtcgcgcggttagccagcgtacatgacgatattttgcgtctaccgcaaggttacgatacagaggtgggcgagcgcggtgtgatgctttccggcgggcaaaaacagcgtatctccattgctcgtgcgttattagtcaacgcggaaatcctcatccttgatgatgcgcttagcgcggtggacggacgcactgagcaccagatcctgcataacctgcgtcagtgggggcagggaagaacggtaatcatcagtgcccatcgcctttctgcactgacggaagccagtgaaattattgtgatgcagcacggacatatcgcccagcgtggcaatcatgatgtgctggcacaacaaagcggctggtatcgcgatatgtatcgctatcaacaactggaggcggcgctcgacgacgctccggaaaatcgcgaggaggccgtcgatgcgtaactaaaaatcgcgaggaggccgtcgatgcgtagttttagccaactgtggccgactctcaagcgcctgttagcgtacggtagcccgtggcgtaaaccgctggggattgcggtcctgatgatgtgggttgcggcggcggcagaagtcagtgggccgctgcttatcagctattttatcgacaatatggtagcgaaaaataacctgccgttgaaagtggttgcagggctggctgcggcgtatgttgggctgcaactgtttgccgccgggctacattacgcgcagagcctgctgtttaatcgggcggcagtaggcgtagtgcaacagttgcgtaccgacgtgatggatgctgcgttacgccagccattaagcgagtttgatacccaacccgtcgggcaggtgatttcccgcgtcactaatgacactgaagtgatccgcgatctctacgttaccgtagtggcaactgtcctgcgcagtgccgcgctggtgggcgcgatgctggtggcgatgttcagcctcgactggcgaatggcactggtggcgataatgattttcccggtggtgctggtggtaatggtgatataccagcgttacagcacgccgattgtccgtcgtgtgcgcgcctatttggcggatatcaacgacggctttaacgaaatcatcaatggcatgagcgttatccagcagtttcgtcagcaggcgcgatttggcgaacgtatgggggaggccagtcgtagtcactatatggcgaggatgcaaaccctgcgcctcgacggttttctgctgcgtccgctgctgagtctgtttagtagcctcattctttgtggcttgttgatgctgtttggcttctccgccagcggcaccattgaagtgggcgtgctgtatgcgtttatcagctatcttgggcgacttaacgaaccattaatcgaactgaccacgcaacaggcgatgctgcaacaggctgttgttgctggtgagcgcgtgtttgaactgatggacggaccgcgccagcaatatggcaatgatgatcgcccgttacagagtggcaccatcgaagtcgataacgtgagttttgcttatcgcgatgacaatctggtgctaaagaacattaatctctctgtgcctagccgcaattttgtggcgctggtcgggcataccggcagtggcaaaagcaccctcgccagtttattgatgggctattacccgctaacggaaggtgagattcgccttgatggtcgtccattaagtagcctaagtcacagcgcgctgcgccagggcgtggcaatggtgcagcaagatccggtggtgctggcggataccttcctcgccaacgtgacgctggggcgggatatctccgaagaacgcgtctggcaggcgctggaaaccgtgcaactggcggagctggcgcgtagcatgagcgacggtatttacacgccgctgggcgagcaggggaataatctcagtgttgggcaaaagcaactgctggcactggcgcgcgtgctggtcgagacgccgcaaatcctgatccttgatgaggcaaccgccagcattgactccggtactgaacaggcgattcaacatgctctggcggcggtgcgtgaacataccacgctggtagtgattgctcaccgcttaagcaccattgttgatgccgacaccattctggtgcttcatcgtgggcaagccgtggagcagggcactcaccagcaactgctggcggcccagggacgctactggcagatgtatcaactgcaacttgcgggcgaagagctggcagccagcgtgcgtgaagaggaaagtttgagcgcctgaatagcgcaatatttcatcgttggtgcaaaaatgtaacgcactgtgcactgtcatagtgcgttttcattttcaaacttcttaacttcctgctctctttctcgtttttcatttctggcacaccgcttgcaataccttcttcgtgtagcagaaccattaccgaattctgaccggaggggatctatgaagctggtgaccgtgataatcaaaccattcaagctggaagacgttcgtgaagcgttatcttccattggtattcagggcctgaccgtcaccgaagtgaaaggtttcgggcgtcagaaagggcatgccgagctgtaccggggggcggaatacagcgtcaatttcctgccaaaagtaaaaattgatgtggcgattgctgatgaccaactcgatgaagtgatcgatatcgtcagtaaggcggcttacaccggaaaaattggcgacggcaaaatcttcgtcgctgaattgcaacgcgtcattcgtattcgtaccggcgaagccgacgaagcggcgctgtaatctctggcacacagcaacaggaacgaaaaatgaagatagcgacgataaaaactgggcttgctagtctggcgatgcttccgggactggtaatggctgcacctgcggtggccgataaagccgacaatgcgtttatgatgatttgtactgcgctggtgctgtttatgactattccggggattgccctgttttacggtgggttgattcgcggcaaaaacgtgctgagcatgctgacgcaggtgacggtgacatttgcactggtctgtattctctgggtggtttacggttacagcctggcgtttggtgagggcaacaacttcttcggcaacattaactggttgatgctgaaaaacatcgaactgacggcggtgatgggcagcatttatcagtatatccacgtggcgtttcagggaagctttgcctgcattaccgtcggcttgatagttggggcgctggcggaacgaatccgcttcagtgctgtgttgattttcgtggtggtatggctgacgctctcttacattccgattgcgcatatggtgtggggcggtggtttgctggcttctcacggtgcgctggatttcgcgggtggcaccgtggtgcacattaacgccgcaatcgccggtctggtgggcgcgtatctgataggaaaacgcgtgggcttcggtaaagaggcgtttaaaccgcacaacctgccgatggtcttcaccgggactgccattctctatatcggttggtttggctttaacgccgggagtgcgggcacggcgaatgaaatcgcggcactggcatttgtgaatactgtggtcgcaacggcggcggcaattcttggctggatcttcggtgaatgggcgctgcgtggtaagcctagtctgctgggggcgtgttctggcgcgattgccggtctggtcggcgtgacgccagcctgcggctacattggggttggcggcgcgttgattatcggcgtggtagctggtctggcgggcttgtggggcgttaccatgctcaaacgcttgctgcgggtggatgatccctgcgatgtcttcggtgtgcacggcgtttgtggcattgtcggctgtatcatgaccgggatttttgccgccagcagcctgggcggcgtgggcttcgctgaaggtgtgacgatgggccatcagttgctggtacagctggaaagcatcgccattacgatcgtctggtccggtgttgtggcatttatcggctacaaattggcggatctgacggttggtctgcgtgtaccggaagagcaggagcgagaagggctggatgtcaacagccacggcgagaatgcctataacgcgtaacaagcactgcaaaaaacagccggacggttttcacctccggctatttttttaattgtgattacgcatcaccccttcctgaacggtgctggcaaccagtacgccgtcttgggtataaaactcaccgcgcacaaagccacgtgcgctggacgcgctggtgctctccacgctatacagcagccattcattcaaattaaacgggcgatggaaccacatggaatggtcaatggtggcaatctgaatccccggttcgagaaaaccgatgccgtgcggctgtagagctaccggcaggaagttaagatcagaagcgtaaccgagcagatactgatgaacgcgcaggtcatccggcacgctaccatttgcgcggatccacacctgacgatgtggttctgcgacgtgacctttcagtgggttatgaaactccaccggacggacttccagcggacgatcgcagatgaatttatctttcagcactggcggcagcaggtgcgccaggctttgggcgatttgcgtttcgctagggaggccatcaggcgctggcgcggacggcattgttttttgatgttcgaaacccgcttctggtgcctggaaagaggcagtcatataaaaaatcggtttgccgttttgaatagcagcaacccggcgggcgctgaagctgttaccgtcacgcagcgtttcgacatcataaataatcggcttcttactatcgccagggcgaagaaagtagctgtgaaagctatgtaccagccgctcttcagggacggtctcttttgcagcatacaaggcctgacccacgacctggccgccaaacacctggcgtaaacctaaatcttcactctggccgcgaaagagtccttcctcaattttttccagatttaacaatgtcagtaaattttttagcgcctgactcatataactctccagtaacaaagctgccgcagcaagccaaagtgagttgagtataacgcaaatttgctactggtccgatgggtgcaatggtctgaattacgggctaattacaggcagaaatgcgtgatgtgtgccacacttgttgacgttactattttgttaaccactcttccggcgaggaaagttagcccgctggtgcattgataataaggagaaatgaatgaaactcgtgcacatggccagtggtttagcggttgcgattgcgttggcggcttgcgcagataaaagcgcggatattcagacgccagcaccggctgcaaatacgtctattagtgcaacacaacaaccagctatccagcaaccgaatgtctccggtaccgtctggatccgtcagaaagtcgcactgccgcctgatgctgtgctgaccgtgacactttctgacgcgagcttagccgatgcaccgagtaaagtgctggcgcagaaagcggtgcgtactgaaggtaaacagagtccattcagctttgttctgagttttaacccggcagatgttcagccgaacgcgcgtattctgttgagtgcggcgattaccgtgaatgacaaactggtatttatcaccgataccgttcagccggtgatcaaccagggcggaactaaagccgacctgacattggtgccggtacagcaaaccgccgtgccggttcaggccagcggtggcgcaacgactaccgtacctagcactagtccaactcaggtgaatccgtctagcgcagttccagctcctacgcaatattaagcgacgttaaccctctccgcccggagagggttagtagttccagcgataacgctgcaagtcgatttgcccgcttccgcttaccatcacaccttctgccagtaatgcctgtcgctgacgctgtaaatccggtccggttaggctaattgtgccgtggcgattaaccacccggtgccagggtaaggtgctgccttcagggagacgctttaacacaccgcccacctggcgcgcggcgcgggggcttcccgccagtttcgccacatcaccgtaagtggtgacatagccttcgggaatagcggcgacgatttgccagacgcgttggggaaaactatcttctttttccatcttttcttcctgaggtaatttttcagcataatctggaaaaacgccgctgtgaagtcgcattgcgcaagaaaccagcatctggcacgcgatgggttgcaattagccggggcagcagtgataatgcgcctgcgcgttggttctcaacgctctcaatgggggctctgttggttctcccgcaacgctactctgtttaccaggtcaggtccggaaggaagcagccaaggcagatgacgcgtgtgccgggatgtagctggcagggcccccacccatttctgcctcccaccgtttcgtcaaaaaatcccaacatggctaaactttaaccacaactgacgtcgcaagaattgtctggctgcgcagtacgcttcggaggtatgtctgatgaagtatgttgatggttttgtggttgccgttcctgccgataaaaaggatgcctatcgggaaatggccgctaaggctgcgccattgtttaaagagtttggcgcgcttcgtattgtcgaatgctgggccagcgatgtaccggatggcaaagtgaccgattttcgtatggcggtgaaagcggaagagaatgaagaggttgtctttagctggattgaataccctagtaaagaggtccgcgacgctgctaatcaaaagatgatgagcgacccacggatgaaagagttcggcgagtccatgccgtttgacggcaagcgaatgatctatggcggattcgagagtatcatcgacgaataagtagcgtgacgggctgtgcggcgtgccgtcagcccaaaaattcacaaatgttgctcggcccagcgtaagaaatcttctttcggtaatgccttgctgtagagccagccctgaccgtagtgcacgccatgctggcgtaaccactcttcttgtttactggtttcgattccctccgctaccattttcagtttcagtgtttttgccatttcgatgatatgcggcgtgacatttttatattccagcgcatcaacgaaagatttatcgatcttcagaatgtcgacatccagatcctgtaaataacttaaactactataccccgtaccaaaatcatcaagataaatttcatggcccgcctcccggtagcgagaaattatcggggcgctggttttcggatcggcaaactcgcgttcagtgagttcaagcgcgatctgtctgggattaacctgatagtgattgatcatgtcacgcagcaattgcgggattttttcgctggtgagcacgggggattcaagattgatgctaatatgctgctgtggatgctgacgcagccagtcgcccatatcttcaaagacgcttcttataatcagtagcgtcaatggctcagaaaggcccgtttgctgtgccagcggaataaaactatctggactcaaccaactaccgtctgtctgcggccagcgcgccagtgcctcagcaccgacaattttgccattggctaaggagacaatcggctgatagtgcacgcaaatatcacgattttcgatagcatcctgcagccgatgatgcggactctgaatacggcgcaaaatacgcagcacaaacatcgctgccagcaggccaatcaccaacccgagcggtaaccaaataaagacttgccgatgccagcctttctgcaacattttcgtactagcccatgtgatgatgctaatattcatctccggtaagggcaggatatcgtaaatgattccattattttcgatatgctcaccgggtgttttttgtagcctggtaataattccctgagcaatttcatcgctgctggttatgacaacgttatgggcattgccaataatggcggcatcaatttgccaactgctatagggaatgacatcaataaaggaagcggggtcgatcatgacgacataatgtgccgttcccatggcgaccatgtaacggataatgcctaaatcgttatggcttgttaaccagacacgataaccatctttgctaattttacctggctcggggaaggtatcgggcggactttcatgctccagagagctacactggggaacgttgttatcgatataagccacttcctgaatatagcgataactgtaagatacccgacgcatttccatgagatgggcttcgctacaggcagcgccttgccatctttccagctcctgcagcgcatctttcccttgtgtcgccaccttattggctcgaatagcgacgcgggaggaataggtatccagctcttcaataaagcttgtttctacctgctgatgggccagccagatgcttaagccgacaggcagcaatacactaagaatcagtactccgctaataaggccgaccagatgtcgtgttctcaccagcatatccttattaacacagtgtagggaaagtatatctgattgtggaaaaaggctggctggagataaggaggtagagctggtatttcatgaagtgatgggtggaaacgatcattgtcatttgaccaggcgcagagctttacgcctggtatgtaaccctaacttaagatgtactttcggcgcgagcgagggtaaaaatatcgtaaaaagacagttcacctttacggacgatcattttttgcagttgttccttatgaacatccgcgacacgcggagagttcaagatggcttcaaccagcgcggcaggtacaaagcgcgtgttgtaccattcgccgttatagcaaacgcggaaatccagcacgtcgatatcttcatagcggtagcgtgggtagacatcgaaaaagaagaaaccattaagcaggataaataatacaaccagtagccagacagagccactcagcgtttcggactgcaacatcaccgccagggtggcaaaaaaagcaacgtacataccgataaacagccccggatgtttacggataaaactgatactaaagcggggtttgttgtcgcgtttttcgcgggtattcagagactcaatcgtttcggtcagcaggcgttgtatttcggtcatcgtttgccttcgtggtatctgcaactttccagggaacaccctattttaacgtgggaatagtagaggggaagtaacagatctaccacaattttgcataacagttgcgaaaaaccgattacaattttttaattattctggctggattaccgcccacgacaacgttgtccgggacatcttttgtgacaactgcaccactggctaccacgacgttatcaccaatggtcacaccagggttaatgaccgcgcgtccgccaatccagacgttattaccgatggtgacgggtttccccagttcagcaccgctattacgtgctacagggtcgatgggatgtgttgccgtgtagatatgaacgcctggtgccaacatacagttatcaccgatgcgaatagggcagacatcaagcatcacgcaatcgaagttggcgaaaaaattattaccgagaaaaatgttatagccatagtcacagcgaaacgttggctcaatataagcctctgtcacctgaccgaatagatcagcgagaatttgctggcgtaatgtgtgctcttccgccagggaatgattgtatcggtgaataagctgacgagcgcgcaggcgatcgcgagataacgtctcatctgcgctgcgatacaactcaccagcaatcatcttttctttttctgtgctcattactgacctccggttgctgaaaatgcggcaacacagtaagacgaaaagtcagtgaagagaacgttcccattacatctgtgtgataaagatcacatagggtatgtcttcatggcgaaaaagtataaaattcttaataaacagccggttatagctccgaaagcgaattatttattagcgaataaatttccatacactggaagggatcttgtcgtacagtttattcatggtcaattcggcgaggcggtgatctgcggcactgtaaaataccgccagttcattatcacttaattcgtatttatttttctcgataacacgctccagcgtgtcaattgtctggcaacgacgtaaacgcattaaataatcggttttcgttaaaggtttttcggacatacttctacctatggttgtaataattttaacaagataaactcgcaggattctctttcgtcgcattgacaaaacaacggaatagtcgattaccactcttccgccatttctgaagatcctgcatattaataccataactactgaacaacataaaggtgtcatccagatattcgtcgatctgctcaatgagcttattgtcttcattatacttaattttgtaattaagtgcgaaggtcgcaatatgctcaatcagttcattcaactggaggttgatcgcgctggttgggtcgtttacccagccatgattgctttcttcaaggtttgcaaggcagtcatgatacagggtttcacagagaaacttaagctgtgcgatatcatgtcttttgggactgtattcatccataacgcgtccccttcttagcggttgaactaacggacacctttcgggatggaaaaaacttactgacctggacttgccctctcgtttgttagcttaactataagccactctttgcaggttttcatcgcattattacgaaaaattacaattaggaaggaagcgggacaggactcactttttcatactagcactaacccgcagcaggtaaaagcagtttgctcgaactattcataacatttcaggattatcgccagatgaaattggtgacactaataccaggattgctctgaatatgacgtaataaccgaggaatgaataaagaattaccgcaaataattaagaatagcctctaaatgattatggattattaaatctattagcgctacttaatataaattaactaacaatcagtattttttatgaattttatccgtggttaatactggttttcgtatgagatcctgagttggtggttcaattactccttaatgttcgtaggttatgcataaaaaaggccgcttacgcggccttagtgattacacgttgtatcaatgatgatcgacagtatggctgtgctcgatatcttcattcttgcggctaaagcggcggcgaaccaccacaaagaataccggaacgaagaagattgccagtaccgttgcggtcaccatcccgcccattacaccggtacctactgcgttctgcgcgccggaaccagcaccagtactgataaccagcggcataacgccgaggataaacgccaggctggtcatcaggatcggacgtaaacgcatccgcaccgcatcaagcgtcgcttcaatcagacctttaccttctttatccatcaagtctttggcgaattcgacgataaggatcgcgttcttcgcgctcaacccaatggttgtgagcaggcctacctggaagtaaacgtcattggtcaggccacggaaggtggcagccagcaacgcaccgataacccccagcggaacgaccagcataacggagaacggaatgctccagctctcgtacagcgccgccagacacaggaacacgacaatcaagctaatcgcgtacagactaggtgcctggttgccggagagacgttcctgataggacatccccgtccagtcatagccaacaccggtaggcagtttgctcgccagttgttccatcagctccattgcttcaccggtacttttacccggtgccgcctggcctaagatttccatggatggcaggccgttgtaacgttccagacgcgggctaccgtactcccaacgagaagaggagaacgcgctgaatggcaccatctgaccatcagcagcacgaacataccagtcgccgatatcatccggcagcatacggtatttcgcttcactcatgacataaactttcttcacacgaccgcggtcgataaagtcgttcacatagctgccgccccatgcagcgcccagagtggtgttaatgtcgttgatagaaacacccagcgcctgcgctttttcctggtcgatatcaatcttaaactgcggggtatcttccagaccgtttggacgtacgctggtcaacatatcagggtgcttcgctgcttctgcaagcaactggttacgcgcctgagtcagtttttcgtgaccaaggccagcctggtcaatcagctcaaagtcaaagccggttgcagtacccagttccacgattgcgggcaggttaaaggcgaaaaccatcgcatctttgatttggctgaaagcgcgtgttgcacgcatggtaatcgcttcaactttgttttcttcgcccggacgatcggcccagtccttcaaggaaacgaacgcaataccggtattctgaccacgtcccgcaaagccgaagccgttaacggcgaacacgctctcaacgttgttcttttctttggtcagatagtaatgcgttacctcattgagcactttctgtgtacgttcctgcgttgcacctgctggcagctgaaccatggtcataaacacgccctggtcctcatctggcaagaaggagcttggcagacgcacgaacagataggccatgccgaccacgatgatcagatacagcaccaggtaacgccccgtactgcgcagaataccgcctacgctgtcggtgtagtggtgcgtgctcttctcgaacatgcggttaaaccagccgaagaagccttttttaccttccccgtgatcgcctttggcaatcggtttcagcatggtggcacaaagagctggagtcaggatcaacgccaccagtacgctcagcgccattgcactaacaatggtaatagagaactgacgatagatagcaccagtagaaccgccaaagaaggccatcggtacgaataccgcgctcagtaccatcgcgataccgaccagagcgccctgaatctgccccatgctcttacgggtagcttcttttggcggcaaaccttcttccgccataacacgctcaacgttttctaccacaacgatggcgtcatccaccaacaggccgatggcgagcaccatcccgaacattgttagcgtgtttatgctgaagccaaaggcggcaaggacggcaaaggtcccgagcaataccaccggtacggcaatggtcggaatcaacgtcgcgcggaagttctgcaggaacagatacataaccaggaacacgaggatgatcgcttcgaccagcgttttaaccacttcgtgaatagagattttcacgaacggcgtggtgtcgtatgggtaaacaattttcagaccgctcgggaagaacggttccatcttcgccagttcagcacggattgccgcagcggtatccagcgcgtttgcaccggtcgccagcttgatccccagaccggaagccggttggccgttaaactctgcgatgatgtcgtagttctcaccacccagctcaatcttcgcgacgtcacgcagcagcacgcgggaaccatcctgattcactttcagcaggattttgccgaactcttcagtagaggtcagacgcgtctgagcaataatagaggcgttaagctgttggcctttcaccggcggcgtaccaccgagctgacccgccgcaacctgggcgttctgcgctttgatggcggtaatgacatcaaccggcgttagctggaatttgttcagctcattcgggttcatccagatacgcatcgcgtactgactaccgaacaactgaacatcacccacgccgctcgtacggctgatggcatctttcatattcgccgccacgtagtcggagatatcctcctgcgtcatggtgccatcggtgttgataacgccgacaaccatcaggaagctgctggaacttttctcaacgctcaccccttgctgctgaacttcttgcggcagcaacggcatcgccagctgcagtttgttctgcacctgaacctgcgcgatatccgcatcagtaccagactcaaaggtcagggtgatctgcacggtacccgtggagtcactgttagaggacatgtacatcaggttatcgataccgttcatattctgttcgataacctgtgtcaccgtgtcctgcactgttttcgcatcagcgccggggtaggaggcggagatcgttactgccggcggtgcaatcgtaggatattgcgccaccggcagtttgaggatcgccagcccccctgccaacatgatgataatggcgatcacccacgcaaaaatcgggcgatcgataaagaaattaggcatgtcttaacggctcctgtttaagttaagacttggactgttcaggctgagcaccgcttgcggcttgctggttattatcagcggtaacttcttgtgcttttacctggacaccaggacgcactttctgcagcccacttattactacgcgatcgcctgctttcagaccttctgtcaccagccacttatcgccaatagcctggcttgcaacgatcggacgggtttccactttgtcatccgcgccaactaccagtacggtggcatcgccacgcggcgtacgggttacgccctgttgcgggactaaaatagcgtttggattaagcccttcttccagacgtgcgcgcacgaacatacccggcagcagagtgtgatccgggttcgggaagatagcgcgtagggtgatagacccagtggtctgatcaacggtaacgtcagagaattccagcgtaccgtcctgcgggaacttaatgccgtcactggtgatcagactcactttggctttgccgttctcttgtttcagcgtgccattcgccagttcctgtttcaggcgcaggaagtcgttgctggactgggtcacatcaacgtagatcggatcaagttgctgcacggttgccagcgcagtcgcctgaccgttctgtaccaatgcgccttccgtcacgttgctcttaccaatgcgaccgctaatcggagaggtgactttggtgtaagccagattgatccgcgcagtttcaacggcagctttcgccgcagttaccgcagcattcgcctgttgcgcatcagccagagcctgatcgtactcttgcttactgatgtactgagtaccgagcagtttctgataacgattcaccgtcaattgcgcgatattggctgcagcctgggctttcgccagatcacctttcgcactgtcgtatgtcgcctgataggtcgcaggatcaatctgatagagagagacacctgcttcgatgtcgctaccttctttgaaattacgcttcaggataatcccgctaacttgaggacgaacttctgcgatccggtaggcactggtgcgacccggaagctcggttgtgatctgcagaggttcagttttgactgttactacgccaacggcgggcatctgctggccaccttgttgggcctgtttgtcgtcacatcctgttagggctaagctgccactgagcatcagaacgaccgccagaggcgtaaaccctctgtttttgttcatatgtaaacctcgagtgtccgatttcaaattggtcaatggtcaaaagttaataaacccattgctgcgtttatattatcgtcgtgctatggtacatacattcacaaatgtatgtaaatctaacgcctgtaaattcacgaacatatggcacgaaaaaccaaacaagaagcgcaagaaacgcgccaacacatcctcgatgtggctctacgtcttttcagtcagcagggggtaagttccaccagcctgggcgagattgcaaaagcagctggcgttacgcgcggtgcaatctactggcattttaaagacaagagcgatttgttcagtgagatctgggaactgagtgaatccaatattggtgaactagagcttgagtatcaggcaaaattccctggcgatccactcagtgtattaagagagatattaattcatgttcttgaatccacggtgacagaagaacggcgtcgattattgatggagattatattccacaaatgcgaatttgtcggagaaatggctgttgtgcaacaggcacaacgtaatctctgtctggaaagttatgaccgtatagaacaaacgttaaaacattgtattgaagcgaaaatgttgcctgcggatttaatgacgcgtcgcgcagcaattattatgcgcggctatatttccggcctgatggaaaactggctctttgccccgcaatcttttgatcttaaaaaagaagcccgcgattacgttgccatcttactggagatgtatctcctgtgccccacgcttcgtaatcctgccactaacgaataaccctgaatctgactccaggatttttcctggacattttcgtcgttgctattctggttcactgcgtcgtgatattcttgcggtttgactttttcaggtcgttcttcaggttcagaaaccttcattcatcatgactatgttccagtattacaaacgaagtcggcattttgtttttagtgcatttattgcttttgtttttgtcttgttatgccagaacacggcgtttgcgcgggcgagtagcaatggtgatctgccgacaaaagcggacctgcaggcgcaacttgacagtctaaataaacaaaaagatctttctgctcaggacaaactggtgcagcaggatctgacagatacattagccaccctcgataaaatcgatcgcataaaagaagagacagttcagctacggcaaaaagtcgctgaagcgccggaaaaaatgcgccaggcgaccgcggcgttaacagcacttagcgatgtcgataacgacgaagaaacgcgcaaaattctgagcacgctgagcttgcgccagctggaaactcgcgttgcccaggcgctggacgatttgcaaaacgcacaaaacgatctggcgtcttataacagccagctggttagcttacagacgcagcccgaacgcgtgcaaaatgcgatgtataacgctagccagcagctgcaacaaattcgcagtcgtctggatgggactgatgtcggcgagacagccttacgtcccagccagaaagtgttaatgcaggcccagcaggcgttgctgaatgcggagattgaccagcagcgtaaaagcctggaagggaacaccgtcttgcaggataccttgcaaaagcaacgtgattacgtgacggcgaacagcgctcgtctggagcaccagttacaactgttgcaagaagcggtaaacagcaagcgcctgactttaaccgaaaaaacggcgcaggaagccgtctccccggatgaagccgcgcgtattcaggctaatccgctggtgaagcaggaactggaaattaaccagcagttaagtcagcgtctgattaccgcgactgaaaacggtaatcagttgatgcagcaaaacattaaagtcaaaaactggctggagcgggcgctgcaaagcgaacgcaatattaaagagcagattgccgtcctgaagggcagcctgctgttgtctcgtatcctttaccagcaacaacaaacgctgcccagcgcggatgaactggaaaacatgaccaaccgcatcgcggatttgcgtctcgaacagtttgaagttaaccagcagcgtgatgcactcttccagagcgatgcgttcgtcaacaaactggaagaaggtcacaccaacgaagtcaacagcgaagttcacgatgcgttattgcaagtggttgatatgcgtcgcgaattgctggatcaactcaacaaacagttgggtaaccagctgatgatggccattaacctgcaaatcaaccagcagcagttaatgagtgtgagcaaaaacctgaaatccatcctgactcagcaaatcttttgggtgaacagtaaccgtccaatggactgggactggatcaaagcgttcccgcaaagcctgaaagatgaatttaagagcatgaaaatcacggtgaactggcaaaaagcctggcccgccgtttttatcgctttcctcgctggtttgccgctgctgttgattgccgggctgatccactggcgtctgggctggctgaaagcgtatcaacaaaaactggcttccgctgtgggttccctgcgtaacgacagccagctcaacacaccaaaagcgatccttatcgacctgatccgtgcgctgccggtgtgcctgattattctcgcggttggcctgattctgttgaccatgcagctcaacatcagcgaactgctatggagcttcagcaaaaaactggcgatattctggctggtgtttggcctgtgctggaaggtactggagaaaaacggcgttgccgtacgtcacttcggcatgccggaacagcagaccagccactggcgtcggcaaattgtccgcatcagtctcgcattgctgcctatccatttctggtctgtggtggcagaactttccccgctgcatctgatggatgatgtgctggggcaagcgatgattttcttcaacctgctgctgattgccttcctggtatggccgatgtgccgcgaaagctggcgtgataaagagagccacaccatgcgactggtcaccattaccgtgctgagcataatcccgattgcgctgatggtgctgactgctacaggctacttctacactacgctgcgtctggcaggacgctggattgaaaccgtttatctggtgatcatctggaacctgctgtaccagacggtactgcgtggcttaagcgtagcggcgcggcgtatcgcctggcgtcgtgcgctggcgcgtcggcagaatctggtgaaagagggcgcagaaggtgctgaaccgccggaagaacccaccattgcactggagcaagttaaccagcagacgctgcgtattaccatgttgctgatgtttgcgctgttcggtgtcatgttctgggcaatttggtccgatttgatcaccgtgttcagctatctcgacagcatcacgctctggcattacaacggcactgaagctggcgctgcggtggtgaaaaacgtcaccatgggcagtctgttgtttgcgattatcgccagtatggtggcctgggcgttgattcgcaacctgcctggtttactggaagtgctggtgctcagccgactgaatatgcgccagggcgcgagctatgccattactaccatccttaactacatcattattgctgttggtgcgatgacggtgttcggaagcctgggcgtctcttgggataaactccagtggctggccgcagcattatccgtaggtcttggttttggtttacaagaaattttcggtaacttcgtctccggtttgatcattctattcgaacgtccggtgcgtattggcgatacggtaaccattggtagcttcagcgggacggtaagtaagatccgtattcgtgcgacaacgattaccgatttcgatcgcaaagaagtgatcatcccgaacaaagcgtttgttaccgagcgtctgatcaactggagcttgactgacactactacgcgtctggtgatccgtctcggcgtggcctatggctccgatctggaaaaagtgcgtaaagtgttactgaaggcggcgactgagcacccaagggtgatgcacgaaccaatgccggaagtcttctttacggcatttggtgccagcacgttggatcatgagctgcgtctgtatgtgcgtgaactgcgtgaccgtagtcgtactgtcgatgagctgaaccgtactatcgatcagctgtgccgtgaaaacgacatcaacattgcctttaaccagcttgaagtgcatctgcacaacgagaagggcgatgaggtgacggaagtaaaacgcgactacaaaggcgatgacccgacgccagcggtagggtaaaaacgaaagggggcaacatttagttgccccgagattgctaacaaagtgcgcgttgttcatgccggatgcggcgtgaccgccttatccggcctacgaaaccgcaagaattcaatatattgcaggagcggtgtaggcctgataagcgtagcgcatcaggcagttttgcgtttgcccgcaaccttaggggacatttagcgaccccatttatttctcacttttccgcctcatcatcgcgcgttaatttcttttcataatcacgctttacaatatccagcgcgcgcagcacggtactggcagggatctgattttcctccagcagcacaatcaaatcgacagccagtttgacatcgtcaggggcattttccagactcatattctctccattgttagcgggttaaacgcgctaacctgttttcgattttttccagcgcatggcggcagcgtgccaggcgcgcttcataggcttccacttcacgatgcagcgtttgctgttccacgagatcggtcacccgcgccagacgggctctgcgttcggcaaccatctcacgtagccgccgctcaaaatcctgatgctgaatacgtttacgctgccagcgggcaattttcggtggtgcactgtcccactcgcgcaaactccaggcggaggcttcacgcgcgatggcttccagttgtgccgccagatgttccgccagccaggccacttgcggcagctgttgctgctcaactgcatgacgaagcgcagccagattatcgcccgcctcgtcgagacaagcctgtagtgttgtcgcacgagtctgaaaaagatgcctgtcgaaacgagcacttagcgtggcgaactgactcaccggggcacaacgctgacgcagcgtagcgagctgtccttccagtttttccagcagcagggcggttttcacgataagacctcaatgaaaatgataattgttatgctaaagtagccactctgtaagctgacaacactcaatatgcaacgaatcattttaatcatcattggctggctggcggtagtgctgggtacgctgggcgtggtattaccggtattaccgacgacgccgtttatcctgctggcggcctggtgctttgcccgttcttccccgcgctttcacgcctggttgctgtaccgcagttggtttggcagctatctacgtttctggcagaaacatcatgcgatgccgcgcggcgtcaaaccgcgggcgattttgcttattttgctcacgtttgccatttctctgtggttcgtccagatgccatgggtgcgcatcatgttgctggtaattctcgcctgtttgcttttctatatgtggcgaattccggtgattgatgaaaagcaagaaaagcactgaagcacaacaatcgcagttgcaattattgcgtacagccagtacattctggcgttttcgagcacaggcgcaggcggtcaaaggttaaacaactgttacttttgatacgtttaaaacgcgccgtgagtaccaccgtaacaagcaggcatacacttatgaccgcgactgcacagcagcttgagtatctcaaaaatagcatcaaaagcattcaggactacccaaaacccggcattcttttccgcgatgtcaccagcttactggaagacccgaaagcttacgctctcagcatcgacttgctggttgagcgttacaaaaatgcgggcattaccaaagttgtcggcaccgaagcgcgtggcttcttgtttggcgctccggtagctctgggtctgggcgttggctttgtaccggtccgtaaaccgggcaaactgccgcgtgaaaccatcagtgaaacttacgacctggaatacggcaccgatcagctggagatccacgttgatgccatcaaaccgggcgacaaagttctggtggtggacgacctgctggcaaccggcggcactatcgaagcgaccgttaaactgatccgtcgtctgggtggtgaagtggctgacgctgcgttcattatcaacctgttcgatctcggcggcgaacagcgtctcgaaaaacagggcattaccagctacagccttgtcccgttcccgggccattaattatcgccagtcttgtgctgcccacgctacggacagcacaagatgtgcattcagcctcgccgttctgacggggctgtgttagcattaccccttcgtgaatccaccttccagcgtttcagagcctgccaatgagttatcaggtcttagcccgaaaatggcgcccacaaacctttgctgacgtcgtcggccaggaacatgtgctgaccgcactggcgaacggcttgagcttagggcgtattcatcatgcttatcttttttccggcacccgtggcgtcggaaaaacctctatcgcccgactgctggcgaaggggctaaactgcgaaaccggcattaccgcgacgccgtgcggcgtgtgcgataactgtcgtgaaatcgagcaggggcgctttgtcgatctgattgaaatcgacgccgccagccgcaccaaagttgaagatacccgcgacctgctggataacgtccagtacgctccggcgcgtggtcgtttcaaagtttatctgatcgacgaagtgcatatgctgagccgccacagctttaacgcactgttaaaaacccttgaagagccgccggagcacgttaagtttctgctggcgacgaccgatccacagaaattgccggtgacgattttgagtcgctgtctgcaatttcatctcaaggcgctggatgtcgagcaaattcgccatcagcttgagcacatcctcaacgaagaacatatcgctcacgagccgcgggcgctgcaattgctggcacgcgccgctgaaggcagcctgcgagatgccttaagtctgaccgaccaggcgattgccagcggtgacggccaggttagtacccaggcggtcagtgcgatgctgggtacgcttgacgacgatcaggcgctgagcctggttgaagcgatggtcgaggccaacggcgagcgcgtaatggcgctgattaatgaagccgctgcccgtggtatcgagtgggaagcgttgctggtggaaatgctcggcctgttgcatcgtattgcgatggtacaacttagccctgctgcacttggcaacgacatggccgccatcgagctgcggatgcgtgaactggcgcgcaccataccgccgacggatattcagctttactatcagacgctgttgattggtcgcaaagaattaccgtatgcgccggaccgtcgcatgggcgttgagatgacgctgctgcgcgcgctggcattccatccgcgtatgccgctgcctgagccagaagtgccacgacagtcctttgcacccgtcgcgccaacggcagtaatgacgccaacccaggtgccgccgcaaccgcaaagtgcgccgcagcaggcaccgactgtaccgctcccggaaaccaccagccaggtgctggcggcgcgccagcagttgcagcgcgtgcagggagcaaccaaagcaaaaaagagtgaaccggcagccgctacccgcgcgcggccggtgaataacgctgcgctggaaagactggctagcgtcaccgatcgcgttcaggcgcgtccggtgccaagcgcgctggaaaaagcgccagccaaaaaagaagcgtatcgctggaaggcgaccactccggtgatgcagcaaaaagaagtggtcgccacgccgaaggcgctgaaaaaagcgctggaacatgaaaaaacgccggaactggcggcgaagctagcggcagaagccattgagcgcgacccgtgggcggcacaggtgagccaacttagcctaccaaaactggtcgaacaggtggcgttaaatgcctggaaagaggagagcgacaacgcagtatgtctgcatttgcgctcctctcagcggcatttgaacaaccgcggtgcacagcaaaaactggctgaagcgttgagcatgttaaaaggtagtacggttgaactgactatcgttgaagatgataatcccgcggtgcgtacgccgctggagtggcgtcaggcgatatacgaagaaaaacttgcgcaggcgcgcgagtccattattgcggataataatattcagaccctgcgtcggttcttcgatgcggagctggatgaagaaagtatccgccccatttgatcgtaagcacagcttacgttcgtcatccttaacgtgattgagagagaaacctatgtttggtaaaggcggtctgggtaacctgatgaagcaagcccagcagatgcaagaaaaaatgcagaaaatgcaggaagagatcgcgcagctggaagtcaccggcgaatctggcgcaggtctggtaaaagtgaccatcaacggtgcacacaactgccgtcgcgtagagatcgacccgagcctgctggaagacgacaaagagatgctggaagacctggtggctgcagcattcaacgacgcagcacgtcgtattgaagaaacgcagaaagaaaaaatggcctctgtatcctccggaatgcagctgccgcctggctttaagatgccgttctgatgcaaaccagcccgctgttaacacagcttatggaagcactgcgctgtctgccgggcgttggcccgaagagcgcgcagcgtatggcgttcacgctgcttcagcgcgatcgtagcggcgggatgcgtctggcgcaggcgctcacccgggcgatgagcgaaatcggccactgcgccgattgccgcactttcaccgaacaggaagtctgtaacatctgtagcaatccgcgtcgtcaggaaaacggtcaaatctgcgtggtggagagtccggcggacatctacgccattgagcagacggggcagtttagtggtcgttattttgtgttgatggggcatctgagtccgctggacggcatcggtccggatgatatcgggcttgatcgtctggaacagcgtctggcagaggaaaaaatcactgaagtgatcctcgccaccaaccccacggttgaaggtgaagctaccgctaactacattgccgagctttgcgcgcaatatgacgtggaagccagccgaatcgctcatggcgttccggttggcggcgagctggaaatggtcgacggcaccacgttgagtcactcccttgccgggcgtcataagattcgtttttaagcaaacgagagcaggatcacctgctctcgcttgaaattattctcccttgtccccatctctcccacatcctgtttttaaccttaaaatggcattattgaggtagacctacatgaaaggacaagaaactcgtggttttcagagtgaagtgaaacagcttctgcacctgatgatccattctctctattccaataaagaaatcttcctgcgtgagcttatctctaacgcctccgatgcggcggacaagctgcgtttccgtgcgctctctaacccggacctgtacgaaggtgatggcgaactacgcgttcgtgtctctttcgataaagacaagcgtacgctgaccatctccgataacggcgtggggatgacccgcgacgaagtgattgaccatctggggactatcgctaaatccggtaccaaaagtttcctcgaatccctgggttctgaccaggcgaaagacagccagctgatcggtcagtttggtgttggtttctactctgcgtttatcgtggccgacaaagtgaccgtgcgtactcgcgcggcaggcgaaaaaccagaaaatggcgtcttctgggaaagcgctggcgaaggtgaatacaccgttgccgacatcaccaaagaagatcgtggtactgaaatcaccctgcatctgcgtgaaggcgaagacgagttcctcgatgactggcgcgtgcgttccatcatcagcaaatactccgaccatatcgcgctgccggtagagatcgaaaaacgcgaagagaaagacggcgaaaccgttatctcctgggagaaaatcaacaaagcgcaggcgctgtggactcgtaacaagagcgaaatcaccgatgaagagtacaaagagttctacaaacacatcgcccacgactttaatgatccgctgacctggagccacaaccgtgttgaaggtaagcaggagtacaccagcctgctgtacatcccgtcccaggctccgtgggatatgtggaaccgcgatcataaacacggcctgaaactgtatgttcagcgtgtgttcatcatggacgacgcagaacagttcatgccgaactatctgcgcttcgtgcgtggtctgattgactccagcgatctgccgctgaacgtttcccgtgaaatcctccaggacagcacggtaacgcgtaacctgcgcaatgcgctgaccaagcgtgtgctgcaaatgctggaaaaactggcgaaagacgacgcggaaaaataccagaccttctggcaacagtttggcctggtactgaaagaaggtccggcggaagatttcgctaaccaggaagcgatcgccaaactgctgcgttttgcttctacccataccgattcttctgcgcagaccgtatctctggaagactacgtttcccgcatgaaagaagggcaggagaaaatctactacatcaccgcagacagctatgcggcagcgaagagcagcccgcacctggaactgctgcgtaagaaaggcatcgaagttctgctgctttccgaccgcatcgatgagtggatgatgaactatctgactgagttcgacggtaaaccgttccagagcgtgtctaaagttgacgagagccttgaaaaactggctgacgaagttgatgagagcgcgaaagaagcggagaaagcactgactccgttcatcgaccgtgtgaaagccctgctcggcgagcgcgtgaaagatgtccgtctgactcaccgtctgaccgatacgccagcgatcgttagcaccgacgcggacgaaatgagcactcagatggcgaaactgttcgctgcggcgggccagaaagtgccagaagtgaaatacatcttcgaactgaacccggatcacgtactggtgaaacgtgcggcagatactgaagatgaagcgaagttcagcgagtgggtagaactgctgctggatcaggcgctgctggcagaacgcggcacgctggaagatccgaacctgtttattcgtcgtatgaaccagctgctggtttcctgatgtaatgccggatgaccttcgtgtcatccggcatttttcttttcatcatctgcactttccgcaaattatctcgccattaaccgtttcagccccaggtgcctttcttgaggcaatcgcctgttggtggtatcgtttatcgctttttcaaaaaattcgacacattttaaggggattttcgcaatgcgtatcattctgcttggcgctccgggcgcggggaaagggactcaggctcagttcatcatggagaaatatggtattccgcaaatctccactggcgatatgctgcgtgctgcggtcaaatctggctccgagctgggtaaacaagcaaaagacattatggatgctggcaaactggtcaccgacgaactggtgatcgcgctggttaaagagcgcattgctcaggaagactgccgtaatggtttcctgttggacggcttcccgcgtaccattccgcaggcagacgcgatgaaagaagcgggcatcaatgttgattacgttctggaattcgacgtaccggacgaactgatcgttgaccgtatcgtcggtcgccgcgttcatgcgccgtctggtcgtgtttatcacgttaaattcaatccgccgaaagtagaaggcaaagacgacgttaccggtgaagaactgactacccgtaaagatgatcaggaagagaccgtacgtaaacgtctggttgaataccatcagatgacagcaccgctgatcggctactactccaaagaagcagaagcgggtaataccaaatacgcgaaagttgacggcaccaagccggttgctgaagttcgcgctgatctggaaaaaatcctcggctaattcgaaagcgcgcacggacagtcccctcgccccctcggggagagggttagggtgaggggaacaggcccgcacaagcaaacttatcagcaatctcaggccggatattcattcggccttttacaaaaacctcaatctgcgctattcctttttctgatttgacctctcacagcaattagttcttcttcctcacttttccgctacaattatcaacaagttgaatcgataagaggcggtaatgcgtcagactaaaaccggtatcctgctggcaaacctgggtacgcccgatgcccccacacctgaagcggtaaaacgctatctgaaacaatttttaagcgacagacgcgtggttgataccagtcggttgttatggtggccattgctgcgcggcgtgattttgccgctgcgcagcccgcgtgtggcgaagctgtatgcctctgtctggatggaaggtggcagcccgctgatggtttacagccgccagcaacagcaggcgctggcacaacgtttaccggagatgcccgtagcgctgggaatgagctacggcagcccaagtctggaaagcgccgtagatgaactcctggcagagcatgtagatcatattgtggtgctgccgctttatccgcaattctcctgttctacggtcggtgcggtatgggatgaactggcacgcattctggcgcgcaaacgtagcattccggggataagctttatacgtgattacgccgataaccacgattacattaatgcactggcgaacagcgtacgcgcttcttttgccaaacatggcgaaccggatctgctactgctctcttatcatggcattccccagcgttatgcagatgaaggcgatgattacccgcaacgttgccgcacaacgactcgtgaactggcttccgcattggggatggcaccggaaaaagtgatgatgacctttcagagccgctttggtcgggaaccctggctgatgccttataccgacgaaacgctgaaaatgctcggagaaaaaggcgtaggtcatattcaggtgatgtgcccgggctttgctgcggattgtctggagacgctggaagagattgccgagcaaaaccgtgaggtcttcctcggtgccggcgggaaaaaatatgaatatattccggcgcttaatgccacgccggaacatatcgaaatgatggctaatcttgttgccgcgtatcgttaaagctgagcggtaaagaactgagcgccgtcgcgaagagcctcgtcggcggttttcatcatccgactataatgcaaaaaggcgtgcagcgtgcctgggtagagtttgaactcacagggctgctgatgcgccgctaacgtctggtaaagcagacggctgtcatccagcagcggatcgaactccgccccggcaataaaacagggcggaacttcgcgagtgagatcattattaaacagacagtaatacgggctctcgcggtccgcgtcgttgcttaaatatgcctcttcgtacatctgcaaatcctgttgcgttaagccatcccagacaccgcccaacagacgacgagtcacggaatcccgtaatccgtaaagcccataccacagcaaaacgcccgcaactttaccgcaatcgatctgtttatcacgcaaccacaacgcactggcgagcgccagcatggcacctgcggaatcaccggcaaagccaatgcgggacatattgatttgataatcctccgcctgctggtggaaataacaacaagcagccacaatttcctctatcgcttgcggaaaacgcgcttcaggactaagggtgtaatcaataccaatcaccgtacattggctgtagcttgccagcaggcgcatgatgcgatcgtgggtatcgagattgccgagaataaaaccgcctccatgcaaataaaatagcgtcgctgggctatctggctgcggacaaaagagacgtgtttccacctgcccatattttgttggaaccatgtaagctctggttgccatttctggagcgcccgcattccagaatcggcgctcaagcgtgtaatactgtcgttgctcagcaatcgttcccgttgcgggccagggcggtaaatccggctgaagagtattcacaacggtcttcatttcagcagaaataaggtccagaacaggtagtttgttttccggcttcatacaaaaactcctttcaaattacgtcattgtaaggaaccactgccatgaaaatgcgatcccgcctgctgatattgaaactggctgcgtctcgcgcgctcccgtcagattgtgttaacattcgccgctcagttaaccacccgtaaaaacaaccatgaaatttcccggtaaacgtaaatccaaacattacttccccgtaaacgcacgcgatccgctgcttcagcaattccagccagaaaacgaaaccagcgctgcctgggtagtgggtatcgatcaaacgctggtcgatattgaagcgaaagtggatgatgaatttattgagcgttatggattaagcgccgggcatagtctggtgattgaggatgatgtagccgaagcgctttatcaggaactaaaacagaaaaacctgattacccatcagtttgcgggtggcaccattggtaacaccatgcacaactacagcgtgctcgcggacgaccgtagcgtgctgctgggcgtcatgtgcagcaatattgaaattggcagttatgcctatcgttacctgtgtaacacttccagccgtaccgatcttaactatctacaaggcgtggatggcccgattggtcgttgctttacgctgattggcgagtccggggaacgtacctttgctatcagtccaggccacatgaaccagctgcgggctgaaagcattccggaagatgtgattgccggagccagcgcactggttctcaccagttatctggtgcgttgcaagccgggtgaacccatgccggaagcaaccatgaaagccattgagtacgcgaagaaatataacgtaccggtggtgctgacgctgggcaccaagtttgtcattgccgagaatccgcagtggtggcagcaattcctcaaagatcacgtctctatccttgcgatgaacgaagatgaagccgaagcgttgaccggagaaagcgatccgttgttggcatctgacaaggcgctggactgggtagatctggtgctgtgcaccgccgggccaatcggcttgtatatggcgggctttaccgaagacgaagcgaaacgtaaaacccagcatccgctgctgccgggcgctatagcggaattcaaccagtatgagtttagccgcgccatgcgccacaaggattgccagaatccgctgcgtgtatatagccacattgcgccgtacatgggcgggccggaaaaaatcatgaacactaatggagcgggggatggcgcattggcagcgttgctgcatgacattaccgccaacagctaccatcgtagcaacgtaccaaactccagcaaacataaattcacctggttaacttatagtagcttagcgcaggtgtgtaaatatgctaaccgtgtgagctatcaggtactgaaccagcatagtcctcgtttaacgcgcggcttgccggagcgtgaagacagcctggaagagtcttactgggatcgttaagttatcgtcggttcgtaggccagataaggcgttcacgccgcatctggcatttggctctcgatgcctgatgcgacgctggcgcgtcttatcatgcctacatatttttcatattttacatccggcaaccaccgtttaccccgtcaccacctcacccgccggtggcgtttccagcagttccagcatggtacgggcgatttcacgctcgcccatcactacctgattcgcaccacgttcggtgatatacgccacttcatcgtcataatgggcgcgggcaataatctcaatatccggatttttcgcgcgggcagatgccacaatctcacccgcttcataaccgttgggaatcgtcaggatcagccattttgcacattccagatgcgccagttgcataatttcttcgttcgccgcattgcccaatactgcgcggaccccgcgctctcgcagctcatcaacacgggttcgactcgtctcaatcaccaccagcggaatatcagaggcgagcaatttctcccccagcaggctgcctacacgaccgtaacccaccagtagcgcatggttgcaaatatccactgggatctgcttctcttcttcgattgcctcttccagcgtctgctcttccagcgtttcggtcttcgccagatatttctccagtagtgcgaacagtaccgggttgagcataatgctcaggatcgcccctgccagtaccaggttttgtccggcctgcggcagtaaattcaatgccattcccagtcccgccaggataaacgcgaactcaccaatctgcgccaggctggcggcgatggttaatgccgtacgttgggagtgaccaaacagtcgcaccaggaaaaatgcggctaagctcttaccaaacagaataatcgccagcgtcgccagcactgccagcggttgctgaatcagaattaacggatcaaacaacatcccgacggagacaaaaaacagcaccgcaaacgcgtcgcgcaatggcagcgtatcgtgggcggcacggtgactcagttcagactcgttcagtaccatcccggcaaagaacgcaccgagtgcaaaggagacatcaaacagctctaccgcaccaaaggcaacccctaacgccagcgccagcacgctcagggtaaacagctcgcgagaaccggttgccgcgctgcgtgccataatccacggcaccagacggcgacctaccagcatcataatggcgataaatgcgatcactttgccgatggtgatccccatatcgactgcaagagtggcaaagcccacatcgccctgttccatcattcctgccactgcgggcagcaacaccagcgtcagaaccattaccaggtcttccacaatcaaccaaccgatggcgatttgcccacgctgactgtcaattaattgccgttcttcaagtgcgcgcagtaacaccacggtactggcggtggaaagacataaaccgaacacgataccggtcattaagctccagcccagcacggcagagagcgccatacccagcagcgtcgccacggctatctgggcgatcgcaccgggaatggcgatggcctttaccgccatcaaatccttcaggctaaagtgcaaaccgacgccaaacatcaacagaatgacgcccagttcagccagttccggggcaagcttggtatcggcaacaaagcccggagtgaatggtcctgccagcacacccgctaacagatatcccaccagaggagaaatacgtagtttattggccagcatgccgaggataaaggcgagcacaaggccgccaacaatggtggtgataagcggggtggcgtgatgcattccgtctccttttcctggtggttattgtccatttttggccgggaaaaccaaaattacaggtaatagtttatgacaatttcattgatgatgttcatgaataattattgaattttgcagaaaaatggaattagctgcaaaaaaagcacggatcggaaaacagaaggcggtttaacagaggaaaggcttatggcgactgtaaaacgatgcagccaaagtttgcctttggctgcaatgaaatcagtctttatgccggttatcaggcaggaatatggtcaacatccccaatagtggcaggaaagcacagattttatagactaactcgatgctggtgtgatcggcgataagccccagaactgccgctcccagacctcccatgccaaaagcaaaaccgaaaaagagtccagaaaccataccgatacgtcctggaagcagctcctgagcgtagaccagaatggcagagaatgcgctagcgaggataaatccaataatcaccgttaaaacccccgtccagtgcaggctggcgtagggtaaaatcagcgtaaacggcgcaacgccgaggatagagccccaaatcacatatttccgcccaattttatcccctacaggcccgccgatcaccgtacctgccgcaacggcaaacaggaaggcaaacagatgaagctgagcattctggatagataatccgaatttttgcatcagataaaaggtgtaatagctgctgatgctcgccatatagaaatatttgctgaaaatgaggattaacagaatgctgaccgccagtacaactttattgcgcggcagtggattgataatcgtcgctttgggttttcctttattcattcggtgctgtgcgctgtaccaacggctgatttgcgccaacaccacgatcgccagcagtgccgcaagcacaaaccaggcaacgttgcctttgccataaggcgcgataatcaccgccgccagcaagggtcccagggaactgccaaagttgccgccgacctgaaagatagattgcgccaggccatgccgcccgccggaagccatacgggccacgcgagaagattccggatgaaagacgctactaccggtaccgaccagcgccgccgccagcagaactgcgccaaaactgcccgccagcgcaagcagcaccagaccgcttaaggtaaagcacatgccaattggcaagctccatggcatcggatatttatcggtccagtagccgaccactggttgcagtaggctagaggcgagctggaaggtgagggttatcatgccaatctgcataaatgtcagagaaaattcactctgaagcagcggataaatcgccagaatcaggctttggatcatgtcgttcagcagatgactgaggctgatagcacctaaaataccaaagcttgttcgggccttggtcgtactcgcagccgcgcccgccacaggctggggttgttcactcattgccataggaaagtcactttttcagggttgcgatgtaaagaatgatcttatttgtgattattaccagactaacatacctgtatgcgtcgtctgaaggaagtctcaacgccgaatacagaatttctaatctggatgcagatttatcttcaccggacgcagacttgtctatgatgtcgcgtcatactatttttcaacacgttgaaatcaggtcagggagagaagtatgaaattattgcagcggggcgtggcgttagcgctgttaaccacatttacactggcgagtgaaactgctctggcgtatgagcaggataaaacctacaaaattacagttctgcataccaatgatcatcatgggcatttttggcgcaatgaatatggcgaatatggtctggcggcgcaaaaaacgctggtggatggtatccgcaaagaggttgcggctgaaggcggtagcgtgctgctactttccggtggcgacattaacactggcgtgcccgagtctgacttacaggatgccgaacctgattttcgcggtatgaatctggtgggctatgacgcgatggcgatcggtaatcatgaatttgataatccgctcaccgtattacgccagcaggaaaagtgggccaagttcccgttgctttccgcgaatatctaccagaaaagtactggcgagcgcctgtttaaaccgtgggcgctgtttaagcgtcaggatctgaaaattgccgttattgggctgacaaccgatgacacagcaaaaattggtaacccggaatacttcactgatatcgaatttcgtaagcccgccgatgaagcgaagctggtgattcaggagctgcaacagacagaaaagccagacattattatcgcggcgacccatatggggcattacgataatggtgagcacggctctaacgcaccgggcgatgtggagatggcacgcgcgctgcctgccggaagcctggcgatgatcgtcggtggtcacagccaagatccggtctgcatggcggcagaaaacaaaaaacaggtcgattacgtgccgggtacgccatgcaaaccagatcaacaaaacggcatctggattgtgcaggcgcatgagtggggcaaatacgtgggacgggctgattttgagtttcgtaatggcgaaatgaaaatggttaactaccagctgattccggtgaacctgaagaagaaagtgacctgggaagacgggaaaagcgagcgcgtgctttacactcctgaaatcgctgaaaaccagcaaatgatcagcctgttaagtccgttccagaacaaaggcaaagcgcagctggaagtgaaaataggcgaaaccaatggtcgtctggaaggcgatcgtgacaaagtgcgttttgtacagaccaatatggggcggttgattctggcagcccaaatggatcgcactggtgccgactttgcggtgatgagcggaggcggaattcgtgattctatcgaagcaggcgatatcagctataaaaacgtgctgaaagtgcagccattcggcaatgtggtggtgtatgccgacatgaccggtaaagaggtgattgattacctgaccgccgtcgcgcagatgaagccagatagtggtgcctacccgcaatttgccaacgttagctttgtggcgaaagacggcaaactgaacgaccttaaaatcaaaggcgaaccggtcgatccggcgaaaacttaccgtatggcgacattaaacttcaatgccaccggcggtgatggatatccgcgccttgataacaaaccgggctatgtgaataccggctttattgatgccgaagtgctgaaagcgtatatccagaaaagcagcccgctggatgtgagtgtttatgaaccgaaaggtgaggtgagctggcagtaatccgaaagtgccggatgtttgcatccggcacaatgcttaatcgcggcgggcgatatcagcaaatttggcatcgaggatctttgccagatcgcctgccgccagttcgatatccagtccgcgcttgccgccggaaacataaatagtggcaaattcttgtgcgggggcgtcgataatcgttggcagacgttttttctgccccagtgggctaatccccccaaccaggtatcccgtgctacgctgcgcgaccatcggatcggccatctcaactttcttggcacccagcgcttttgctacttttttaagatccagttgacctgcgaccggcgtaacggccacggcaaggtgtttcatatcaccgttcactgccaccagcagcgttttgtagacctgatccggattcaaacctaattttttgacgacttcatcgccaaaattggtttcagccggatcgtgctcgtaggtatggatttgaaagctaatcttgtttttttcgagtaatttaactgcgggtgtcatggtaattttcctgccttaaacaaaaaaacgaagcaagcatacgcctgatggcggtccaaaaaaaagagtcatcttgcctaagagtattggcaggatggtgagattgagcgacaatcgagttacaccgtcgcttaaagtgacggcataataataaaaaaatgaaattcctctttgacgggccaatagcgatattggccatttttttagcgcaacatttgcggcaaattcccttctccatacaggtgtagtgcaccgaccgcgaccacatatcgccccggcggcatggcgcgtaatttatcccgccaggcgagatttcgctgatgcatcagcacatcgtacaggctctgactgaacgtattgggcagcgttatatcattattttgcggcggtgcattcagccaccagctcatcatttgttgcagcaaccgtgcgttggtatgccagtgggtcagcgtatcgtccagcagcgccagtcctttgtcagggagctggagcaacatggcaatctggttttcagccccttccagttcaatcacgggtttatgttgttgcttcgccgcctgcaatagctggtaatcgataccgtattctgcccgcagccccagtttttgtgcctgcgtcgcctgaagaaccatcgcgatttgccacagcggttgggtagaaaagagactgggagaaatgcccatctcctggctaatgtgctgcaggttttggagttgctcctcgctaatgcgctcttccagcgcctcgcaggcaggcaaattagcaaaaggcgtatcgctggtggaaacatccgcctcgacgatcagcgcatcggcgtttttgagctttttgagcaaacgggtgggcaggggagccatatcgtggctacccatatgaatactgccaatcagatgaaaatggcgattgccggggagggtgatatcgatggcaggccaggtgtaatgattaccgcgcagcgcggcccaaagcgtttttacccggtacaacagatccatacgacctccctttgtgaaatatcatgctagcgcgcggtgagggatggcgcaaatggagttggagacttgtttaatgtgtttgtatgattcagtatgttcttgcatcgctattcacaaggaagcaacagttaaaaaccatgaaacaggcaacaagaaaaccgacgacacccggagatattcttctctatgaatatctggaaccgctcgatttgaaaatcaatgagttagcagagttgctgcatgttcatcgtaatagcgtcagtgcactgatcaataacaatcgtaaactcactactgagatggcatttcgtctggcgaaagtttttgataccacagtcgatttttggctaaacctccaggcggcggttgatctttgggaagttgaaaacaacatgcgcacccaggaagaattgggacggattgaaacagtggctgaatatttggcacgccgtgaagagcgtgcaaaaaaggtcgcgtaaggccaaaacatcgcttcatctcgtaggccggataaggcgttcacgccgcatccggcatccgagcaccattgcctgatgcgacgcttacccgtcttatcaggcctacaaacttgtgcctgaaccgtaggccggataaggcgtttacgccgcatccggcatccgagcaccattgcctgatgcgacgcttacgcgtcttatcaggcctacaaacctgtgcctgaaccgtaggccggataaggcgtttacgccgcatccggcagtcatgcgtcgatgccaaatgcgccaccctaaagcagcgcatccgcaatgatgtacttattccttcggtttaaaccgcagcaaccggttggcgttactcactacggtaatgctgctgagcgccattgccgctccggcaactaccgggttaagcagtgttccagtgaacggccacaaaataccggcggcgaccggaataccgatactgttgtagataaacgcaccgagcaggttctgcttcatgttgtgcagcgttgcgcgggaaatagcgagcgcatccgcaacgcccatcaggctatggcgcatcagggtaatcgccgcggtttcaatggcaacatcactgccgccacccatcgcaatgccgacatccgcctgagccagcgctggcgcgtcgttaatgccgtcgcccaccattgccacctaacgtccttcactttgcagatgtttgatcgcttcggctttaccgtccggcagcaccccggcgatcacctcatcaatccctgcttctttggcgatcgcattggcggtggttgggttatccccggtcaacatcaccagacgatatcccgctttatgcaggcgttgcagcgccgccacgctatcactacgcaacggatcgcgtactgccagcagggctaccgctttcccgtcaaccgccagcagcacaggcgttgccccttggcttgcctgagcagtaatctccgcttcgatagctttggtaccaacctgttgctcatttaacagcgcctgattgcccagcaataacgcatgaccttcagcttcaccgctcacgcccagcccgcgcaatgtgcggaaaccgttgacctgcggtagctgcatatcacctgctttatcgaggatcgctcgtgccagcggatggctggaaccttgctccagtgccgccgccagacgcaatgcctgcgcttcatcaacatcagcaaatgttttcactgcgacaacctgcggcttcccttcagtcagcgtcccggttttatcgaacactacagtgtcgagtgtactggcgcgttgcagcgcgtcagcgtcccgcaccagcacgccaaactcagccgcccgcccgacgccggaaataatgctcatcggcgtcgccagccccagcgcacacggacaggcaataatcagtaccgtggtggcaatcaccagggtatagacaatctgcggtgccggaccaaagaaataccagattgccgcactgacaagcgcaataaccaccactaccggcacaaatacggcactgattttatccgccagctgaccgatttctggcttgctgctctgggcctggcgcaccatgcgaatgattcgactcagcgtagtatggctgccaaccgcactggcacgaaacagcacactgccgtcctgtaccactgtcccggcatggacgctatcgccttcgcctttttgctgcgggattggttcgcccgtcagcatcgcttcatccagccatgcttcgccctgggtaatctcgccatctaccggcacgcgatcgccggtcgtcaggcgcagcaacatacctggctgcacttctgccagaggcacgcttttttcaccttcgtcagtaaccaggcgtgccgtcggcggggttaaatcgagtaacttttccagcgccttagaagaacgctggcgtgcgcgcgcttccagcatatggccgagattgatcagaccgataatcatcgcgctggcttcgtaataaagatgtcgcgcttccatcgggaaccactgcggccacaggttgacgctcatgctatagagccacgccacgccagtacccagcgccaccagcgtatccatcgtcgccgcaccgttcagcaggcttttccatgcactgcggtaaaaatggccgccggcgaaaaccatcactgccagggttatcaggccgataaccaaccacaggctgcggttgtcagcggtgaccatcatgttatcgccgatcatcccccagaccatcaccgggatacccaccgccagtgcgacaattgcctgccagcggaagcgcttcatcgtagcgacggcggtttcttgctggcgctcgcggcgtttagcgtcatcttcaatcgcttccgcgccgtagcccgctttttccaccgcctgcactaaatcttgtggggaggcactgcccatcaccagcgcagtacgctccgccaggtttacccgtgcctgagtgacgcccggtacgctttgcagcgcattttgtacgcgggtgacacagctggcgcagctcatgccgctcagcagcaactgctggctgtcatcgtcatcggcggtcgctgccggaagcgcctcagaaaccgctgtcagtgcttcgctcgggatactactctccgccagcggtttagcctttgggtggcttacagatgcgtcataacccgcttgtttgatggtttcgatcagctgttctgcactggcagtcccggtaacgtgcgcttcagtgatagacacatccgcctgctcaacatccggacgctgttcaagactttctttcacgcgtttaacgcagtgaccgcaggacaggccgtccagggtcaggtcgatagtttgactcataaaacactcctttaagacagttttgactggctgtgataaaggttaaaccttccagcaaggggaaggtcaagaaattaataaaccaggcgggtaaaagtccgtaaagattaaaaaatcggctcgatttgcatcaggattagacatttatctctttgttttcctgtagttaagttgcgggtgctaagttaaatcaggatgcctgaaaatcggcaccggggtgaggaattacctcccgcatctataaaaaggagttaacaaaagatgttagatgcaaacaaattacagcaggcagtggatcaggcttacacccaatttcacagtcttaacggcggacaaaatgccgattacattccctttctggcgaatgtaccaggtcaactggcggcagtggctatcgtgacctgcgatggcaacgtctatagtgcgggtgacagtgattaccgctttgcactggaatccatcagcaaagtctgtacgttagcccttgcgttagaagatgtcggcccgcaggcggtacaggacaaaattggcgctgacccgaccggattgccctttaacagtgttatcgccttagagttgcatggcggcaaaccgcttagcccactggtaaatgctggcgctattgccaccaccagcctgattaacgctgaaaatgttgaacaacgctggcagcgaattttacatatccaacagcaactggctggcgagcaggtagcgctctctgacgaagtcaaccagagcgaacaaacaaccaacttccataaccgggccatagcctggctgctgtactccgccggatatctctattgtgatgcaatggaagcctgtgacgtgtatacccgtcagtgctccacgctcctcaatactattgaactggcaacgcttggcgcgacgctggcggcaggtggtgtgaatccgttgacgcataaacgcgttcttcaggccgacaacgtgccgtacattctggccgaaatgatgatggaagggctgtatggtcgctccggtgactgggcgtatcgtgttggtttaccgggcaaaagcggtgtaggtggcggtattctggcggtcgtccctggagtgatgggaattgccgcgttcagtccaccgctggacgaagatggcaacagtgttcgcggtcaaaaaatggtggcaagcgtcgctaagcaactcggctataacgtgtttaagggctgatcatgatgaacacggaaggtaataacggtaacaaacctctcggtctatggaacgtcgtttccatcggcattggggcaatggtgggggcggggatcttcgcgctgctggggcaggctgcattgctaatggaagccagcacctgggtcgcctttgcttttggcggtattgtggcgatgttttccggttatgcctatgcgcgtctgggggcgagctatcccagcaatggcggcattatcgacttctttcgtcgcggattaggcaacggcgtctttagcctggcgctcagcttactgtacctgttgacgctggcggtgagcatcgccatggtcgcccgtgcttttggcgcttatgccgtgcagtttttgcatgaaggcagccaggaggagcaccttattttgctctacgcgttggggatcattgcggtgatgacgcttttcaactccttaagcaaccatgcggtagggcggctggaagtgatcctcgtcggcattaaaatgatgatcctgttattgctgattattgccggtgtctggagcctgcaaccggcgcatatttccgtctctgcgccccccagctccggtgcgttcttctcctgtattgggataactttccttgcctatgcgggctttggcatgatggcgaacgcggcggataaagtgaaagatccgcaggtcattatgccacgggcgtttctggtggcgattggcgttaccacgttgctttatatcagcctggcactggttttgcttagcgatgtaagcgcattagagttagaaaaatatgccgataccgccgtagcgcaggctgcttctccgctgctcgggcatgtgggttatgtgatcgtcgtcatcggcgctttactggcgacggctagtgccattaacgcgaacctgttcgccgtgtttaacatcatggacaacatgggcagcgaacgcgaactgccgaagctaatgaataaatccctgtggcggcagagtacctggggcaacattattgtcgtggtgttgattatgctgatgacggcggcactgaatttaggcagtctcgccagcgttgccagcgccacctttttgatttgctacctggcggtgtttgtggtggcgatccgcctgcgtcatgatattcacgccagcttgccgattcttatcgttggtacgttggtgatgttgttggtgatcgttggctttatctacagtctgtggtcccagggtagccgtgcgttgatatggattattggcagtctcttactcagccttattgtggcaatggtcatgaagcgcaataaaaccgtataacatctctctgtgcgcagtacttcctgtattattgtggtggcggtcgatattcgcactggcaaaaaaacgtgcttgaatatctgttgaaaccctttaacaaagcacaggaggcgttgcgcgaacgatgaacatcagcgatgtagcaaaaattaccggcctgaccagcaaagccattcgcttctatgaagagaaggggctggtgacgccgccgatgcgcagcgaaaacggttatcgcacctacacgcagcagcatctcaacgaactgaccttactgcgccaggcacggcaggtgggctttaacctggaagagagcggcgagctggtgaatctgtttaacgacccgcagcggcacagcgccgacgtcaaacggcgcacgctggagaaggtggcggagatcgaacgacacattgaggagctgcaatccatgcgcgaccagctgctggcactggcgaatgcctgccctggcgatgacagcgccgactgcccgattatcgaaaatctctccggctgctgtcatcatcgggcagggtgattaagagctgacggctcggatatgtagggttatcccttctatcgcaatgacttcaacatgcgtacctgcaccgagatcctcgctggcgctgacaggccaactactgtcaccgacgcgcatatgaccgcgcccgttgaccagcggagattccagcacaaaacgtcggccaatcagctgctgcccgcgctggtttaaatgactatcgctgtgcttttgttcgcgcacccgccggctcaaccatttccaccacagccaggcggcgagcagcgtcaggatggcaaacattaccccttgccactcccaacccagcggcaccagccagaccaccaggccggtaatcaccgctgccacgccgctccacaacaaataaccatttccgcccagcatctcggctgccagcagcaaaccgccgagactgagccagaaaatatgtggatgaacgaccattaactccatcatggctgagtccgtttgttggcgctgtctttcaccagctcggcaatcccggcaatgctccccatcaggctgctggcctctaatggcatcatcactactttgctgttactggaggaaccgatctgctgtaacgcttcggtgtatttctgcgctacgaagtagttcaccgcctgaatatcaccggaggcgatagcttcagacaccattttggtggcgcgggcttctgcttcggcggaacgttcacgcgcttcagcctgtaaaaacgcgctctgacgttcgccttccgctttcaggatttggctctgtttttcaccttcggctttgaggatttccgcctgacggatcccttccgcttcaagaatgtaagcgcgtttggtacgttccgctttcatctgcgcgttcatactagagataagctctgccggtgggcgcacgtcgcgaatttcaatacgggtgactttaatcccccacgggttggtggcttcatcgacaatacgcagcaggcgactgttgatgctgtcgcgctgagagagcatttcgtcaagttccatactacccagcacggtacggatgttagtcatggtcaggttgatgatcgccagctccagattgctgacttcataagccgcgcgcggcgcgtcaatcacctgaataaagcacacggcgtcgatggtaacgttggcgttatctttgctgataacttcctgggaagggatatcgagcacttgctccatcatattgatcttgcgaccaatgcgatccataaacggcaccaccagactgagccccggctgtaacgttttggtatagcgaccaaagcgttctactgtccactgatagccctgcggtacgattttgacacccgcgccgacaatgaccagcgcgacaaaaatgagaatcgggataaagataagcatcggaaaaacctcctgttgtaccgtccataatcagcaaaattgctgcttgattaaacaaattatacctgattactgaaagagagttcccccttattcctgcgaaggataaactgtttttagtaaaaatcagaaaaagggaacagcgatgcaggaaaatagtcctttgcttcagctacaaaacgtaggatatctggcgggtgatgcgaagattcttaataacatcaattttagcctgcgtgctggcgaatttaagttaattaccggtccttctggttgtggcaaaagtacgctgctaaaaatagttgctagtttgatcagcccaaccagcggaacgttactgtttgaaggtgaggatgtcagcacactaaagccagaaatctaccgccaacaagtctcttactgcgcccagacaccgacgctgtttggcgatacggtatacgataatctgatctttccctggcagatccgtaaccggcagcctgacccagccatttttctcgattttctcgaacgcttcgccttgccggacagcattttgacgaagaatatcgccgagctatctggtggtgaaaaacaacgcatcagtttgattcgtaacctgcaatttatgccgaaggttttattgctggatgaaataaccagtgcgctggatgaaagtaataaacataacgtcaatgagatgatccatcgttatgtgcgcgagcaaaatattgccgtgctgtgggtgacacacgataaagacgaaattaatcatgcggataaagtgattacactgcaaccgcatgccggagaaatgcaggaagcacgctatgaactcgcataactaaagaaatgcaggaagcacgctatgaacagccataatattactaacgaaagtttagcactggcattaatgctggtggtggtggcaatcttaattagccataaagaaaaactggcgctggagaaaaatattctctggagcgtcgggcgagcgataattcagctgattattgtcggctatgtgctgaagtatattttcagcgtggatgatgccagcctgacattattgatggtgttatttatctgctttaatgcggcgtggaacgcgcaaaaacgcagtaaatatattgctaaagcttttatcagtagctttattgccattacggtcggggcgggaattaccctggcggtgctgattctcagtgggagcattgaatttatcccgatgcaggtgatccctatcgccgggatgattgccggtaacgccatggtagcggtggggttgtgttacaacaatttagggcaacgggtcattagcgaacagcaacagattcaggagaaactgagtcttggtgcgacgccgaagcaggctagtgcgatattgattcgcgacagtattcgcgcggctttaattccgacggtcgatagtgcaaaaacggttggcttagtgagtttaccaggaatgatgtccgggctgatatttgccgggattgatccggtgaaggcgattaaatatcagattatggtgacctttatgctgctcagtaccgccagcttgagcaccattattgcctgctatttaacctatcgtaagttttataatagccgccaccagttggtggtgacgcaattgaagaagaaatgatgcgatgccggatgcgcagcatcgcatccggcgttgtggttcatgtgccgatcaacggaatatcaatacaacaatgcatacagctggcggcgatacttgctcgccagtgcatcacccgtacccagcgcagcgaggatctcctggaacgttttacgcgtctgaccgtctgcggcggtgagatctttacgcagatgcccgaacagcaactccagcgcctcttcattgcgcccaacctgatgcagttgcagcgccagttgcgtcgccagtgcggcatcttctggattctccgccacctgctgttgcaactgttgaatttccggcgtatcagccgcctgcttcagcagttcgatttgcgccaccagcccctggtagcgggtgtcctgatcctgcaacggaatggttttcagcaccgcttccgcatcttcagaacggttcagcgcaatcagcgtttctgccagcagcaggccgatctccccgttctgattgctcaactgccaggcgtctttcagcaatggcagggcatcggtgtaattgctttcctgcatcagttgcatcgcctgctgcgctttcagctcttcttcgcgcggcagcactttatccagcagggcgcggatcgcctcttccggttgcggcccctggaagccatctaccggttgcccgttctggaacagatacacggtcggaatcgcacgcagaccaaactgcgcggcaatcatctgctccgcgtcgcagtccagcttcgccagaataaattgcccgttgtactgcgccgcgaggctttccagaattggggttaactgcaaacagtgctggctacgttcagaccaaaaatagaacagcaccggagtggtcatgctctgttcaagaacctgttgcaggttagattcgttaatgttgacaatattttctacggacatggagtcgctctctgttgtcgatattttctttgacatgggggcttaagcgcgcgcttcaactcacccctgcaatattttgtccatcacgcgccccggcagcaggcgcttaagcaccattaccgcccaggtcaccagcgtcaccggatagcgcatcttcggcttctcgctaataaaagcatggcgtactttgtccaccaccgcttccggtcccaacgtaaagcgggcggcgatgccgggattttcgactggtttatcactttgcgtctggttgacgttgtcggtgaagcgagtacgaatgggaccgggttcgatcaggctgactttaattccgctgtggcgcagctccatgcgcagtgcatcactccacgcctccagcgcatatttactggccgcgtaagcgccacgacccggcgtggagattaatcccatcacgctacttgtcatcacaatacgcccttcaccgtgcggtaacatcgcgggtaacaggcgcatggtgagctggtgtgcgccgaaaaagttggcggaaaactgctgttccatctgcgcacggctgatggtggaaagggggccatacatgccgaatccggcattgttaaagatcccatacagacaattatcggtcagggcgatcacctcgtcggctgcgcgatcaacactttctggactatccagatcgatcaacacgccggtaaatcccatgctgttcatgcgctcaacatcatccggtttccggcaacctgccagcacatgaaaaccctggcgttttaattcgagcgcgctttccaggccaattccactggaacatccggtaattaagacgcttttttgcataactttacctgtcaggatctccgttgctttatgagtcatgatttactaaaggctgcaacttatttaactgtcatgatttactaaaggctgcaactgcttcgccatccagtcggcaataaacggctgggcgtcgcggttgggatgaataccgtcatcctgcatccattgtggcttgaggtagacctcttccataaaaaagggcagcagcggaacatcaaactctttggcgagtttggggtaaatggcgctaaaggcttcattataacggcgaccatagtttgcaggcagacgtatttgcattaacaatggttcagcgttggcggctttgacatcctgcaaaatctggcgcagcgtttgctcggtttgctgtggctgaaaaccacgcaaaccgtcattgccgcccagttcaaccagcacccaacgcggctgatgctgtttcagcagagccggaaggcgcgccagtccttgttggctggtgtcgccgctgatgctggcattaactacgctcgttttactctgccacttatcattcaacaaggcaggccaggccgcgctggcagacattcgatacccggcgctcaggctatcacccagaatcaataacgtgtccgctgcggcggcacggaaggttaacaggaccaggaacaggaagggcaaatgccagcggaaaacattgttgaagttcatcatcttaagaagtccgtcggtcagggggagcatgaactctccatcctcaccggagttgagctggttgtcaaacgtggcgagaccatcgcactggtgggcgagagcggaagcggtaagagtaccttgctggcgatcctcgccgggcttgatgacggcagcagtggcgaagtgagtctggtgggacaaccgctacataatatggacgaagaagcgcgggcaaagttgcgcgcgaagcacgtcggctttgtttttcagagttttatgttaattcctacccttaacgcgctggaaaacgtcgagcttccggctctgctgcgcggtgagagtagcgcggaaagtcgtaacggggcgaaagcgttgctcgaacagttagggctgggtaaacgtctggatcatcttccggcacagctttccggcggtgaacagcaacgagtggcgctggcacgagcctttaatggtcgacctgatgtgctgtttgccgacgaacccaccggcaaccttgaccgccagacgggcgataaaattgccgacctgctgttttccctcaaccgtgaacatggcaccacgttgattatggtgacccacgacctgcaactggcggcacgctgcgaccgctgcttacggctggtgaacgggcagttgcaggaggaagcatgattgcacgttggttctggcgcgaatggcgtagcccgagcctattaattgtctggctggcgctaagcctggcggtggcctgcgtgctggcgctgggcaatatcagcgatcgcatggagaagggcttaagccagcaaagccgtgagtttatggcgggcgatcgggcgttgcgcagtagtcgcgaagtgccgcaagcgtggctggaggaagcgcaaaagcgcggcctgaaagtcggcaagcagctgactttcgccacaatgacctttgcaggcgacacaccgcagctggcgaacgtcaaagcggtggatgatatctacccgatgtatggcgatctgcaaactaatccccctggcctgaaaccgcaggcgggcagcgtattgctggccccacgcctgatggcactgcttaacctgaaaacgggcgacaccattgacgtgggcgatgccaccttgcggattgccggagaagtgattcaggaaccggattccggttttaaccccttccagatggctccgcgtctgatgatgaatctggcggatgtcgataaaaccggagccgtgcagccggggagtcgggtcacctggcgttataaattcggcggcaacgagaaccagctcgacggctatgagaaatggttgttacctcagcttaaacccgaacaacgctggtacggtctggaacaggacgaaggcgcgctggggcgaagcatggaacgcagccaacagttcctgctgcttagcgcgcttctgaccttgctgctggcagtggcagcggtggcggtagcgatgaatcattactgtcgcagtcgctacgatctggtggcgatcctcaaaacgctgggggcagggcgagcgcaactgcgtaagctaatcgtcggtcagtggttgatggtgctgacgcttagtgccgttaccggtggggccataggcctgttgttcgaaaacgtgttgatggtgctgctcaagcccgttctgcctgctgcactaccgccagccagcctctggccgtggctgtgggcgcttggcaccatgacggtcatcagcctgctggtggggctacgaccatatcgcttgttgctggcaacgcagcctttacgcgtattacgtaatgatgtggtagcgaacgtctggccgctgaagttttatctgccgattgtcagtgtggtggttgtgctgctgctcgccggattaatgggtggcagcatgctgctttgggcggtgctggcgggcgcggtagtactggctttgctgtgcggtgtgctgggctggatgctgctgaatgtacttcgccgcatgacgctgaaaagcctgcctctgcgcctggcggttagccgcctgttacgtcagccgtggagtacgttaagtcagcttagcgcatttagcctctcctttatgctgctggcactgctgctggtgttgcgtggcgatctgctcgaccgctggcagcagcagctacctccagaaagcccgaactactttttaattaacatcgccacagaacaggtagcaccgctaaaagcgttcctcgcggaacatcagatagtcccggaaagcttttatccggtggtgcgggcgcggctgacggcgattaacgataagccgacagaaggtaatgaagatgaggcgcttaaccgcgaactcaatcttacctggcaaaatacgcggcccgatcataatccgattgtcgccggtaactggccgccaaaagccgatgaagtgagcatggaagaggggctggcgaaacgcttaaacgttgccctcggtgataccgtgacttttatgggcgatacccaggagttccgcgctaaagtgaccagcctgcgcaaagtggactgggaaagtctgcggcctaatttctattttattttccctgaaggggcattagacgggcaaccgcagagctggcttaccagtttccgctgggagaatggcaacggcatgttgacacaactcaaccgccagttcccgaccattagcctgttagatattggcgcgattttaaaacaggtcggtcaggtgctggagcaggtaagtcgggcgctggaagtgatggtggtactggtcaccgcctgcggtatgttgctgttgctggcacaggtgcaggtgggaatgcgtcagcgtcatcaggagctggtggtgtggcgcacactcggtgcggggaaaaaactgctgcgtaccacgttgtggtgtgagttcgccatgcttgggtttgtttccggcctggtggccgcaattggtgcggaaacggcgctggcagtgttgcaggcgaaagtgtttgattttccgtgggagccagactggcgattgtggattgttctgccgtgcagcggagcgctgctgctgagccttttcggcggctggctgggtgcgcgactggttaagggtaaggcgctgttcaggcagtttgcggggtgatgagagtccctcattaccgcgccttaacccattccgccacttccgcccactcaccgcgaaagacaactttttccgcttttttctcaagctgatagcgatacatcgggtcgtaatattcttcaagtaacggcaccagccaggccagatgaccgtcggtgctgccggtggtgagttgcgttgtcagtgctgcatccagccttgcagccagttcgttatagcgctgtagccccagccgacgcttaatcgcgctaagtccgtgatgcaggtattcgcaatactcctgccagccctgttcgtcgccgtacgcgtgggtaaaatcatgatgcatacgcaagaaatactcttcgttcaggcgctcaagacggatctcaaacggatcttctaccaccgcaatcgccgcctgagtcattcgctcgcgcaggcattccggcaggtgattgctaccgatcatccggctttcgtcttccagcacccacaggcgcaaattctgacgggcgtcggtttttagcatttcggcagccagcaggttttcaaaactcgcctggctaagttgtggttgtaacgtgcgaccaaacgcgctaccgcgatgacgcgccaacccttccagatcaacaccgttcggctgttgctgcactaacagcgttttaccgctgccggtacaaccgccaatcagcactatcggtttttgtgccagttcaatagtcgcctgaatcgcggtctggcgcagtgccttataaccgccttccaccagcggataatcaatccccgctgcatgcaaccagctttgcacaatatgactgcgctgaccgccacgggcgcagcagagaataccttgcggattttgcaggcacgctgcccgccaggcgtccatgcgctgctgacgaatttcacccgccaccagtttatgtcccagcgccagcgctgcgtcactgccttgctgtttatagcaggtgccaacggcggcgcgttcatcgttattcattaacggcagattgatagcggcgggcattgcgccgtgctcaaactcgataggggcgcgaacatcaataatgggcgtatcagcaatcagcagggcacgatagtcctgttccgtgtgtctctcttgcatagttaaaagtgaacctcaaatcagcttgcgcgctattttacgcgccaacgcgcaaggaaacttgatttttaactgcgtgggttgccgaaaatttctaaaaatccgctgatttccggcctgcgctgggtaaacaaggtcacaatatcttctaccgctttgccgctgccaaatttgcgccatgccagactcaatgggctaggagggcgcatcgttgggattacccggctgaccagttgttgattatcgatcatactctggcaaaggctttttggcaaaaaaccaatgccaacgcccgccagatgggcggcgattttcgtttccatatcgggaacaataatctctttttgccctggcaatcgccaggcgacgcgtttggttaaggtgcgggcgctgtcttcaatattgaccgccggaaagcgccgcaactgcgcttctgttagcggctcttcaacgttcgccagcggatgatccgccgccatgacaaagcgccattgcacgcttcctaagggatcaagactaaaggtatttgccagcgcctcagttcccgtgacgccgatagccaggctaaaaccttcgtacaataggctgtcccagacgcccatatagatttgtcgggagatgtgaaactgggtaaaggggtaacgctcattcagccacgccagcaactgggcgacggcctgggggttgtagagcaggttgttgatgacaatattcacctggcgttccacgccatcattcacctgttgcagctcgcttggcatactttccagccagctcagccagtctctggcctgggaaagtagatgctcgccagccgctgtcaacgtcacgctgcgagtcgtacggaaaaacagcgctactccggtattctcttccagaagtttaatgcgataactgatcgtcgccgtggttttacataatcgttctgccgctttactaaaacttcctgtttcagcaaccgcaatgaaagtccgcaaggtttctggatcgaacatcttcaggtatccccttttaaatccgcaagttgcgtgattttcttatcctctgatttatcagtatttttacatgataaccctgttcaatttgtggactaaatctagttttggaaaaatattccaacttttgtattgatgttgttctcttaaggttttagattgcctgttattgaaaccaagctgaccggtcggcggtggttgaacggaattatgttacaaggacaaaaagatgaaacttcaggtattaccgttaagtcaggaagcctttagtgcttatggcgacgtaatcgaaacgcagcaacgggattttttccatattaacaatggcctggtggagcgttaccacgatttggcgctggttgagattcttgagcaagactgtacgcttatcagcattaaccgcgcgcaaccggcgaatctgccgctgaccattcacgaactcgaacgtcatccgctgggtactcaggcctttatcccgatgaaaggtgaggtgtttgtggtggtcgtggcgttaggtgacgacaaaccagacctgagtacgctgcgggcgtttatcaccaacggcgaacagggagtgaattaccatcgtaacgtctggcatcacccacttttcgcctggcagcgcgtcaccgattttctgaccatcgatcgcggcggcagtgacaactgtgatgttgaaagtattcctgaacaggaactctgttttgcgtgacgcctgcaaccgacttgcataagataaactaattgttcattgtttatgctcacttgtaggtcggagttaacgtaggtatgacggaagttagacggcgcggcaggccaggacaggcggagcctgtggcacagaagggcgcacaggcgttagagcggggaattgcgattctgcaatatttggaaaaaagtgggggaagtagcagcgttagcgatatttctctcaatctggatttgccgctctccacgacctttcgcttgctgaaggttttacaggcagcggattttgtctatcaggacagtcaattaggctggtggcatataggattaggtgtctttaacgtcggtgcggcgtacatccataaccgcgatgtcctctccgtcgccgggccgtttatgcgccgcctgatgttactttccggcgaaacggtcaatgtcgcgatccgtaacggcaatgaagcggtattaattggtcagttagagtgtaaaagcatggtcaggatgtgtgcgccactgggcagtcgtctgccactgcatgcttccggtgcgggcaaagcgctgctttatccgctggcggaagaggagttgatgagcatcattctgcaaaccggtttgcagcagtttacgccaactacgcttgtggatatgcccaccttgctgaaggacctggaacaagcgcgtgaactgggctataccgtagataaagaagagcatgttgtaggtctgaattgcatagctagtgcaatttacgatgatgtcggtagtgttgttgccgctatctccatctccgggcctagtagtagactgacagaagatcgttttgtcagtcagggtgagctggtcagagacaccgcccgcgatatcagcacggcgttgggactgaaagcacatccataatgtctgtcgcatcccgctctgcggagcgggtttttttgacaaaatttgaaagttggaaaaattttccaataaatagaggtaggaataaaatggcaaaaatgagagccgttgacgcggcaatgtatgtgctggagaaagaaggtatcactaccgccttcggtgttccgggagctgcaatcaatccgttctacagtgcgatgcgtaagcacggcggtattcgtcacattctggcgcgtcatgtggaaggtgctagccacatggcggaaggttatacccgcgcaacggcagggaatatcggcgtatgtctggggacttccggtcctgcgggcacggacatgatcaccgcgctctattccgcttctgctgattccattcctattctgtgcattaccggccaggcaccgcgcgcccgtctgcataaagaagattttcaggccgtagatattgaagcaattgctaaaccggtcagcaaaatggcggttacagttcgtgaagcggcgctggtgcctcgcgtgctgcaacaggcatttcacctgatgcgttctggtcgtccgggtccggtactggtggatttaccgttcgacgttcaggttgcggaaatcgagtttgatcctgacatgtacgaaccgctgccggtctacaaacctgctgccagccgtatgcagatcgaaaaagctgtagaaatgttaatccaggccgaacgtccggtgattgttgccgggggcggggtaattaatgctgacgcagctgcactgttacaacagtttgctgaactgaccagcgttccggtgatcccaacgctaatgggctggggctgtatcccggacgatcatgaactgatggccgggatggtgggtctgcaaaccgcgcatcgttacggtaacgcaacgctgctggcgtctgacatggtgtttggtatcggtaaccgttttgctaaccgtcataccggcagcgtagagaaatacaccgaagggcgcaaaatcgttcatattgatattgagccgacgcaaattggtcgcgtgctgtgtccggatctcggtattgtctctgatgctaaagcggcgctgacactgctggttgaagtggcgcaggagatgcaaaaagcgggtcgtctgccgtgtcgtaaagaatgggtcgccgactgccagcagcgtaaacgcactttgctgcgcaaaacccacttcgacaacgtgccggtgaaaccgcagcgcgtgtatgaagagatgaacaaagcctttggtcgcgatgtttgttatgtcaccaccattggtctgagtcaaatcgctgcggcacaaatgctgcatgtctttaaagaccgccactggatcaactgtggtcaggctggtccgttaggctggacgattccggctgcgctaggggtttgtgccgctgatccgaaacgcaatgtggtggcgatttctggcgactttgacttccagttcctgattgaagagttagctgttggcgcgcagttcaacattccgtacatccatgtgctggtcaacaacgcttatctggggctgattcgtcagagtcaacgcgcttttgacatggactactgcgtgcaactcgctttcgagaatatcaactccagtgaagtgaatggctacggtgttgaccacgtaaaagtagcggaaggtttaggttgtaaagctattcgggtcttcaaaccggaagatattgcgccagcctttgaacaggcgaaagccttaatggcgcaatatcgggtaccggtagtcgtggaagttattctcgagcgtgtgaccaatattagcatgggcagcgaactggataacgtcatggaatttgaagatatcgccgataacgcagcggacgcaccgactgaaacctgcttcatgcactatgaataagggagataaataatgttacgtttctctgctaatttaagcatgttatttggagaatatgattttctcgcccgttttgagaaagctgcgcagtgtggttttcgcggcgttgaatttatgtttccttatgactacgacattgaagaattaaaacatgtgctggcgagtaataaactcgaacatacgctgcacaatttaccggcgggtgactgggcggcgggggagcgcggtattgcctgtattcctggccgtgaagaagagtttcgggatggcgtagcagcagcgattcgttatgcccgtgcgctgggtaataaaaaaattaactgtctggtcggtaaaacgccggctggtttcagcagtgaacagattcacgcaacgcttgtagaaaacctgcgttatgccgcgaatatgctgatgaaagaagatattttattactgattgaacctattaaccattttgatattcctggtttccatctcaccggaactcggcaggcgctgaaattgattgatgatgttggttgctgcaatttgaaaattcagtatgacatttatcatatgcagcggatggaaggtgaattaaccaacaccatgactcagtgggctgataaaattggtcacctgcaaattgccgataatccgcatcgcggcgaaccgggaaccggagaaattaattatgattatctctttaaggtaatcgaaaattctgactacaacggttgggttgggtgtgaatataaaccccaaaccaccacggaagccggtttacgctggatggatccgtaccgttaaaacgtaacgctattcagacaatgcttttttaggccgctaagttggcaggggatcgtgttgtctgaattcaggaaaagcgaaatttaaaagaggttaattatgaaactgggatttattggcttaggcattatgggtacaccgatggccattaatctggcgcgtgccggtcatcaattacatgtcacgaccattggaccggttgctgatgaattactgagtctgggtgccgtcagtgttgaaactgctcgccaggtaacggaagcaagcgacatcatttttattatggtgccggacacacctcaggttgaagaagttctgttcggtgaaaatggttgtaccaaagccagcctgaagggcaaaaccattgttgatatgagctccatttccccgattgaaactaagcgtttcgctcgtcaggtgaatgaactgggcggcgattatctcgatgcgccagtctccggcggtgaaatcggtgcgcgtgaagggacgttgagcattatggttggcggtgatgaagcggtatttgaacgtgttaaaccgctgtttgaactgctcggtaaaaatatcaccctcgtgggcggtaacggcgatggtcaaacctgcaaagtggcaaatcagattatcgtggcgctcaatattgaagcggtttctgaagccctgctatttgctagtaaagccggtgcggacccggtacgtgtgcgccaggcgctgatgggcggctttgcttccagtcgtattctggaagttcatggcgagcgtatgattaaacgcacctttaatccgggcttcaaaatcgctctgcaccagaaagatctcaacctggcactgcaaagtgcgaaagcacttgcgctgaacctgccaaacactgcgacctgccaggagttatttaatacctgtgcggcaaacggtggcagccagttggatcactctgcgttagtgcaggcgctggaattaatggctaaccataaactggcctgatacccgcaataaaaatggccgatatcagaaaatgaatcggccagcaatattaaaaaagaaagcagccaaagatgttgctagtgtattaaaaataatatttttattttatttgttcctcatagctagattaaaacaacgttatagcatacgtgaaattaagagggatttatggaacatcagagaaaactattccagcaacgcggctatagcgaagatctattgccgaaaacgcaaagccagcggacctggaaaacatttaactattttaccttatggatgggtagcgttcataacgttcccaattatgtgatggtcggcggcttttttattctcggcttgtctacctttagtattatgctggcaattatcctcagcgcctttttcattgccgcggtaatggtattaaacggtgctgcgggcagtaaatacggtgtgccttttgccatgatcctgcgtgcttcttacggtgtacgtggtgcactgtttcccggattattaaggggcggaattgccgccatcatgtggtttggtttgcaatgttacgcggggagtctggcctgcttgattctgattggcaaaatctggccgggatttttaactctcggtggtgatttcactctgttaggcctttctctaccgggcttaattactttcttaatcttctggctggtcaacgttggtataggttttggcggtggcaaagttttaaataaattcactgccattcttaacccgtgcatctatatcgttttcggcggtatggcgatttgggcgattagtctggtcgggatcggtccaatctttgactacattccgagcggtattcagaaagcagaaaacggtggcttcctgttcctggtggtgattaacgcggtagttgcggtctgggcggcaccggcggtgagcgcatccgactttacgcaaaacgcccacagctttcgtgagcaggcgctggggcaaacgctgggtttagttgtggcctatattctgtttgcggtcgccggggtatgtattattgccggagccagtattcactacggcgctgatacctggaacgtgctggatattgttcagcgttgggacagcctgttcgccagcttctttgcggtactggttattctgatgacaactatctccactaacgcgaccggtaatattattccagccggttatcagattgccgccattgcaccgacaaaactgacctataaaaacggcgtactgattgccagtattatcagcttgctgatctgcccgtggaaattaatggaaaatcaggacagcatttatcttttcctcgatattatcggcggaatgcttggtccggtaattggtgtcatgatggcgcattattttgtggtgatgcgcggacaaattaatcttgatgaactgtataccgcacctggcgattataaatattacgataacggttttaacctcactgcgtttagtgtaactctggtggccgttattttatctcttggcggtaagtttattcactttatggaaccgttaagccgtgttagttggtttgtcggcgtcatcgtcgcctttgcggcctacgccttattaaagaaacgtacaacagcagaaaaaacaggagagcaaaaaaccataggttaattaatcccgatattgaacattgagttaaaaaccaatctgtattttacaaggagtttgttatgtcttttgatttaatcattaaaaacggcaccgttattttagaaaacgaagctcgcgttgtagatatcgccgttaaaggcggaaaaattgctgctatcggtcaggatctgggcgatgcaaaagaagttatggatgcgtctggtctggtggttagcccgggcatggttgatgcgcacacccatatttctgaaccgggtcgtagccactgggaaggttatgaaaccggtactcgcgcagcggcaaaaggtggtatcaccaccatgatcgaaatgccgctcaaccagctgcctgcaacggttgaccgcgctagtattgaactgaagttcgatgccgctaaaggcaagctgactattgatgcggcacaactcggtggcctggtgtcttacaacatcgaccgtctgcatgagctggatgaagtgggcgttgtcggcttcaaatgcttcgttgcgacctgtggcgatcgcggtatcgacaacgacttccgtgatgtaaacgactggcagttcttcaaaggtgcgcagaagctgggcgaactgggtcagccggtgctggtgcactgcgaaaacgcgctgatttgtgacgaactgggcgaagaagcgaagcgtgaaggtcgcgtaaccgctcatgactatgtggctagccgtccggtatttaccgaagtggaagcaattcgccgcgtactgtatctggcgaaagttgctggttgccgtctgcacgtttgccacgtcagcagcccggaaggtgttgaggaagtgactcgtgcacgtcaggaaggtcaggacgttacttgtgaatcctgcccgcattactttgtactggataccgatcagttcgaagaaatcggtactctggcgaagtgtagtccgccgatccgcgatctggaaaaccagaaaggcatgtgggaaaaactgtttaacggtgaaatcgactgcctggtttccgaccactctccatgcccgccggaaatgaaagccggtaacatcatgaaagcatggggcggtatcgccggtctgcaaagctgcatggacgtgatgttcgatgaagcggtacagaaacgcggtatgtctctgccaatgttcggcaaattaatggcgactaacgcagcagatattttcggtctgcagcaaaaaggccgtatcgccccaggaaaagatgccgacttcgtcttcattcagccgaatagcagctatgttcttaccaatgacgatctggaatatcgccacaaagtcagcccgtatgttggccgtaccattggcgcgcgtatcacgaaaaccatcttacgtggtgatgtgatttacgacattgaacagggcttccctgttgcgccgaaaggtcaatttatccttaaacatcagcagtaatctggcccctgcaatgcccgtccttgcggcgggcattctccggttaaggtgtgtttatgttcaattttgcagtcagccgcgaaagcctgttaagtggatttcagtggtttttctttattttttgcaacacggttgtggttcctcctacgctactttctgcttttcagttgccgcaaagtagcctgcttacgctcacgcaatatgcttttcttgctaccgcactggcctgcttcgctcaggcgttttgcggtcatcgtcgcgctattatggaagggccaggtggcctgtggtggggaaccatccttactatcacccttggtgaagcaagccgcgggacaccgatcaacgatatcgccaccagcctggcagtggggattgcactctccggcgtgctgacgatgttgattggttttagcggattaggccatcgcctggcacggttatttacgccgagcgtgatggtcttgtttatgttgatgctgggcgcgcagctgaccactatctttttcaaaggtatgctcgggctgccgtttggcatagccgacccgaattttaaaattcagttaccgccgttcgcgctcagcgtggcggtgatgtgcctggtactggcgatgattatcttcctgccgcaacgttttgcccgttatggcctgctggtcggcaccataaccggctggttgttgtggtacttttgctttccttctagccacagcctctccggtgagttgcactggcagtggttcccgctcggcagtggcggtgctttgagcccgggaattattctgacggcggtgattacaggtctggtaaatatcagcaatacctacggtgcgattcggggcacggatgttttttatccgcagcagggcgcagggaatacgcgttatcgtcgtagctttgtggcgaccggatttatgacgctgataaccgtaccgctggcggtaattccatttagtccgtttgttagttccattggtttattaacccagactggcgattacacgcggcgtagctttatttatggcagcgttatttgcctgctggtggcgctggttcctgcactcacgcgactgttttgcagtatccctttacccgtgagtagtgcggtcatgctggtttcttatctgcctttactcttttccgcgctggtgtttagccagcaaataacgtttaccgctcgcaatatttatcgactcgcattgccgttatttgtcggcatatttttaatggcattaccgcctgtgtatctgcaagaccttccattaacgcttcgtcctctgctcagtaacggcttattggtcgggattttactggctgttcttatggataaccttattccgtgggaacgcatcgaataatttgttgaaaaaggattgataatgaagattgtcattgcgccagactcttttaaagagagcttaagtgcagaaaaatgttgtcaggcaattaaagccgggtttagcaccctctttcccgatgcgaactatatctgtttgccgatagcggatggcggcgaagggacggtggatgcgatggtcgccgcgacgggcggcaacatcgtgacgcttgaagtctgcgggccgatgggcgaaaaagtgaatgctttttatggccttaccggcgacgggaaaacggcggtgattgagatggcggcagcaagtggcctgatgctggtcgcgcctgaaaagcgtaatccgttgctggcctccagttttggtacgggggagttaattcgtcatgcgctggataacgacattcgccatattattctcggcattggcggcagtgcgacggtcgacggcggtatgggcatggcgcaggcgctcggtgtgcgtttccttgatgccgacggtcaggcgctggcggcaaacggtggtaatttagcgcgcgtggcaagcattgagatggatgaatgcgatccgcgtctggcgaattgccatattgaagtagcatgtgacgttgataacccgctggtaggggcacgcggcgcggcggcggtgtttggcccgcaaaaaggggcaacgccggagatggtcgaagaacttgaacaggggctgcaaaattacgcccgtgttttacaacagcaaactgaaattaatgtctgccagatggcgggcggcggcgctgcgggcggtatgggtattgcggcggcggtatttctcaatgcggatattaaaccgggcattgaaattgtgttgaatgcggtcaatcttgcgcaggcagtgcagggcgcagcactggtgattaccggggaagggcgcatcgacagccaaacggcaggcggtaaagcgccgctgggtgtggcgagcgtggcgaagcagtttaatgtaccggtgattgggattgctggcgtattgggtgatggcgtggaagtggtgcaccagtacggcattgacgcggtattcagcattttgcctcgtctggcacctttagccgaagtgctcgccagcggtgaaaccaatctcttcaacagcgcgcgaaatattgcctgcgccattaaaataggtcagggaattaaaaactaacccttacctttaaagcggatgcgatttatatcgcataagagtgcagtactcatgccggatgcggcatgagtaccatatccttcctgaaaatcgcgcaaattctatatattgcagagatcatgtaggcctgataagcgaagcgcatcaggcaatgttacaaaaaaagccacggtataaaccgtggcaaaatccaacatagctaaaaataatcaggcgagtggtatgacttaaatctctacgtcgcggttacaatctttgctgtaaatatagctgaacgcttcaccacgccctacaccataaccagcctgtaaagaataagcgcccataaagatgtaatcgccttttttcaccgggatccagttattgtcgaggttataaaccccctgaccggaaagaatataggcaccgtgttcctgaacgtgtgtttcgatataaccgtggctggcacctggtgcaaaagagaggatatgcatgttcatatcaaaacctaactctttgggcagaaaatccagcagaataacatcgtccatgccttcataatgaatgcgttccagttcgctggcattgccagaaaccagccacggtgcatagccttctaccggaacatagcggcgcttatataaaaagatttggctgtcttcggcctgggcgttaacaaacgtcattaaggagcctggcgggcaataaagatagccaccttcgcttaaggcaaatgttttgccttcggctttggcagtgatatttccagagatcacatacaggaacgtttcaatgccttcgccaccgaagccctgttggttgccaccgttttgatgcagtgtgaccagataatcaacaaaagaggcacccagctttggcgtggagaggattgtcgcgtcacaattttcaaagcccggaataatattttttaccagaccatccggggttaacagtgcgaaattaccgtgtttaacaatcgcacggttagccagtaaatcttcgcggtaaccggtgacgttatttaaatatcccatttatgactccttatttctgccaggcaagttgataaagcatgagtgccaacgttttgaccccttcggcaaggtcggtaatattggtgcgttccgccgggttatggctgatcccgttgatgctggggataaaaatcatgcaggttggtacgcgaggcgcgaaaatttgcgcgtcgtgcccggcaccactgtgcatcacccggtaattcagtttttctctttcacacaattctgtcagggtggcgaccagctccttattcatcggcacgggttcttcgtccatccataaatcgatatcaataccaatgtccatttcatcgcaaatcgcccgcatgtcgttttctaactgttgggtgaaatcgcgcagcacggcagcgtcggtatgacgacaatcaatggtgaacgtggttttacccggcaccacatttaccgtattcgggcgcggctctactttgccaaaggtcagaaccagcggatcgcccatccttttcgctttttcgacgctctgatggcaaatgcgactgaaagcgtaaactgtatcacgacgataacccatcggcgtggtgcctgcatggttactttcgccgttcagcgttaccgtataacgacgctgcccgacaattgcattcaccacgccaatactttgcccattactttccagcacacagccctgttcaatatgcagttcaacaaaggctttaatatcctgacgcggagttagtggggcgttcggaagagtaaatccgcaagccttcatcgcatcgacaaaactatttcctttggcatcacagatattccgcacgtcgtcaggattcgccagcccaaaaatatttttactgccccagaagacatacgggaagcggctgccttcttcttctgccatcgccaccacttcgaccgtacgtagcggcgcgccgtattgcgttttcagccagtcaattgccagccacgccgccagcgcgccgaattgcccgtcaaggttaccgccgttaaccacggtatcgatatggctaccgctcagaaccacttcctgtggatattcggtgccattcaggcgaccgtataaattccccacttcatcgaaacgtgtttccagcccgcttgctgccattctttttttaaattgctgctgggtttccagccattccgggctataaagtaaacgggtcatcccacccgctgggtcagcgccaaaagaggaaagccagggcagcgtttcttctatagcttgacggaaatgtgtaatcataagaaagtcctgtctcaataattattgcgcaaagggatttttcgtttcgtaactcgtgttataaagcgcgtcggaaattaaatactggtaaatatcatcaacaatttcgatgccttcgacggcggctttgcgttgtttaatatcctgatcctgtccgggataataaacctgattaaaaccgggcgcgggggtaatggcatttaattcgcgcatggtctggctaagatgttgacggaataattcgctggaggagaaaaagttcggattaataactatatgtaattgccccaaattacgccctgcgtgtaaatcgtcatacatgctactaacctgtcgcccgaacggtaagccgagtaagacgccactgaggacgtcaatcatcatcatcaggccatacccttttggcccggcggcggggagcagagcatgtaccgcgaacggatcggttgttggtacaccgtttttatcgaccgcccaggtatccgggatagacatattacggctgcgggcgtcgagcacttttccccatgcctgtacggtagtcgccatatcaaaggtaaggatctcgtcgccttctcccggcgcggcaaaggccagggggttagtaccgtagtaaatttccgcgccgccaaacggcaccaccattggatcggactggcacatgctaatgccaatgaatccggcgcgggctgcctgctgcacaaaataagagattgcgccgctgtgacccatccggctgataccgaccaccgcaacgccattttgctgggcggttttgatggcatgttccatacccattttcgccgcgacctgtccggcggcattgtcggcatgtaaaattgcgctgcacggcccggtttcctcaagacgaaactccggttcgcggttggtgccgcctttactaatgcgttccgcgtagtattccacgcgcaccgcgccatgagagtggatccctctggcatcggcgtaaaccaatacttcagccacggttgcagcgtgctcacgttttaacccagcctggcagagtttattctcaattagctggtggagtgtttcccgactgattttcatctgtcttcctttttaacgacggtgtgaagcatgactgcaattaacatacagggaaaatatctggattatgtgatccagacaggcaaaaaaatatagttagaatttatttgataatccgctcacttttaacctgatttttaaaacaacaacgcttattaaaaaataatgagtaatagcctggtggttatttgaattcttttgttaataattcctgtgtgatattcatcaccttatttactcgttgtcatcgataccgtaatcgccacattaacactgctcgtgcaattgccatgggtgcaatttttaaggagttgttatgatccacgcctttattaaaaaagggtgttttcaggatagcgtcagtttaatgattattagtcgaaaactcagcgaaagtgaaaatgttgatgatgtttccgtaatgatgggtacgcccgccaataaagcgttattagataccacaggtttctggcatgacgattttaataacgccacgccgaacgatatttgcgtggcaattcgtagcgaagcggcggatgcggggatcgcgcaggcgattatgcagcagcttgaagaggcgctaaaacaactggcgcaggggagtggcagcagccaggcgttgacgcaggtgcgtcgctgggacagtgcctgtcagaaattacccgatgccaatctggcgctgattagtgtggctggcgagtatgcggcggagctggcaaaccaggcgctggatcgcaacctcaacgtgatgatgttctccgataacgtcacgctggaagatgaaatccaacttaaaacccgcgcgcgggaaaaaggcttgctggtgatggggccggactgcggtacgagcatgattgccggcacaccgctggcttttgctaacgtgatgccggaaggcaatattggcgtcattggcgcttccggtaccgggattcaggagctgtgtagccagattgcgctggcaggggagggaattactcacgcgattggccttggcgggcgcgacctcagccgtgaagtgggcggcatcagtgcgctaacagcgctggaaatgctcagtgcagacgagaaaagcgaagtgctggcatttgttagtaaaccacctgccgaagctgtgcgtctgaaaattgttaatgccatgaaagcaaccggcaaaccgacggtggcgctgtttttaggttataccccggcggtggcccgcgacgagaatgtctggtttgcctccagcctggatgaggccgcacgcctggcttgcctgcttagtcgcgtcacggcgcgacgtaacgcaatagcgcctgtcagcagcggatttatttgcggtttgtataccggcggtacgctggctgccgaagcggcgggattacttgccggacaccttggcgtggaagccgacgatacccatcaacatggcatgatgctggacgccgatagccaccagattattgacctcggcgatgatttctacaccgtcgggcgtccccatccgatgatcgacccaaccttacgcaaccagttaattgccgatctcggcgctaaaccgcaagtgcgcgtgttgctgcttgatgtcgtgattggcttcggtgcgaccgccgatcctgccgccagcctggtgagcgcctggcaaaaagcctgtgccgcgcgtttagataatcaaccactgtatgccattgccacggtgacaggcactgaacgtgacccgcaatgccgcagccagcaaatcgccacgctggaagatgcggggattgcggtcgtgagtagcctaccggaagccaccttgctggcggcagcgttaattcatccgctcagccctgccgcacagcaacacacaccgagtttactggaaaacgtcgccgtgattaacatcggattacgcagctttgcgctggagctacaaagcgccagcaaaccggttgtgcattaccaatggagcccagtcgccggtggcaataaaaaactggctcgtttattagaacgtttgcaataaggggttcccatgtttacatcagtggcgcaagccaatgctgcggttatcgaacaaattcgtcgcgctcgtccacactggctggatgtgcaaccggcttcttcacttatcagcgaactaaacgagggcaaaacactgcttcacgccgggccgccaatgcgctggcaggagatgaccggacccatgaaaggggcgtgcgtgggcgcatgtctgttcgaaggttgggcgaaagatgaagcgcaggcgctggcaatactggagcagggggaagtgaacttcattccttgtcaccatgtgaatgccgtcgggccaatgggcggtattacttctgccagtatgccgatgctggtggttgagaacgtgaccgacggcaaccgggcgtactgcaacctcaacgaaggtatcggcaaagtgatgcgttttggcgcttacggcgaagatgtcctgactcgccatcgctggatgcgcgatgtgttaatgccagtattaagcgcggcgctggggcgcatggagcgcggtatcgatctcacggcgatgatggcgcagggcattacgatgggcgatgagttccatcaacgcaatattgcttcctctgcactgttaatgcgtgcgctggccccacaaattgctcgcctcgatcatgataaacagcacatcgccgaagtgatggatttcctcagcgtgaccgatcagttcttcctcaacctcgcgatggcttactgcaaggcggcgatggatgctggcgcgatgatccgcgcaggcagcatcgtcacggcaatgacccgcaacggcaatatgttcgggattcgggtaagcgggctgggcgaacgctggtttactgcgcctgtaaacactccgcaaggtctgtttttcaccggcttctcgcaggagcaggcgaacccggatatgggcgatagcgcgattaccgaaacctttggtatcggaggtgcggcaatgatcgcagcgcctggcgtaacgcgctttgtcggtgcgggtggcatggaagcggcaagagcggtatctgaagagatggcggaaatttaccttgaacgcaatatgcagttgcagatcccaagctgggattttcagggcgcgtgcctggggctggacattcgtcgcgtggtagaaaccggcattacgccactcatcaataccggtatcgcccataaagaggcggggatcgggcagattggcgcaggcaccgtgcgggcaccgctggcgtgctttgaacaggcgctggaagcactggctgaaagcatgggtattggttgaggaacgcgcaatgacgatcatccatcctctgcttgccagtagtagcgcaccgaattatcgccagtcctggcggttagcgggagtgtggcggcgggcgattaacctgatgacggaaagcggcgaactgttaacgttgcatcgtcagggtagtggtttcggccccggaggatgggtgcttcgccgtgcgcaattcgatgcgttatgcggtggattatgcggcaatgaacgaccacaggttgtggctcaagggattcgcctcgggcgtttcacggttaaacagccacagcgttattgtttgctgcgtattacgccgcctgcgcatcctcaaccacttgcagctgcatggatgcaacgcgcggaggaaaccgggcttttcgggccactggcgttggcggcaagcgatccgctgcctgctgagttacgccagtttcgtcactgttttcaggccgcgctcaatggcgttaagaccgactggcggcactggctgggtaaaggccccggattaacgccgagtcatgatgacacgctgagcggaatgctgctggcggcctggtattatggcgctttagatgcgcgctccggtcgtccgttttttgcctgttccgacaatctgcaactcgttaccacagcggtgagcgtcagttatttacgttatgccgcgcaaggatatttcgccagcccactcctgcactttgttcatgctctgagttgcccgaaacgtaccgctgttgcgattgatagcctgctggcgctggggcatacgagtggggcagatacgctgctggggttctggcttggccaacaattattacaaggaaaaccatgaaaacactggttgtggctcttgggggcaacgccttactccagcgcggtgaggcgctgacggcagaaaatcaatatcgcaatatcgccagtgctgtacccgcgctggcacgcctggcccgttcttatcggttggcgattgttcacggcaacgggccgcaggtggggctgctggcattgcagaatctggcgtggaaagaggtagaaccgtatccgctggatgtgctggttgcggaaagccaggggatgattggctatatgctggcgcagagtttgagcgcacagccgcagatgccgcccgtgacgacggtgctgacgcgcattgaggttagccctgatgatccggcgtttttgcagccagagaaatttattggtccggtttatcagccagaagaacaagaggcactggaagcggcttacggctggcagatgaaacgtgatggtaaatatttgcgccgggtggtggcgtctccgcaaccgcgtaaaattctcgacagcgaagccatcgagttgttgctcaaagaggggcatgtggtgatttgcagtggcggcggcggtgtgcctgtgacggatgacggagcagggagtgaagcagtgattgataaagatctcgccgctgcgttgctcgccgagcagattaatgcagatggactggtgatcctcaccgatgctgatgcggtatatgaaaactggggaacgccgcagcaacgtgccattcgccatgccacaccggatgagttagcgccatttgccaaagccgatggtagcatggggccgaatgtaacggcggtgagtggttatgtcagaagccgtggtaaacccgcgtggattggggcgttaagccgaattgaagagacgctggcgggcgaagcggggacctgtattagcctgtaatcgtaggcattagacatttgtgcctgatgcgacgcttgacgcgtcttatcaggcctacaaccggtgccgcatccggcaattggtgcacaatgcctgatgcgatgcttgacgcatcttatcaggcctacaatgggtaccggatcggtaggccggataaggcgtttacgccgcatccggcaagaatagagcaccagttaaccgaacttactctgcgcccaaatcacgccgctggcatattccggcggcagcagcgggattaaggcttccagcgtcgcagtcagacggcttgtgtcgctgtcggtcaaattcagatgccccactttacgccccggacggacttctttgtcgtaccagtgcagatgcaccagcggcagtttcagccagtcataattcacatcgctaccaatcagattgatcatcacgctcggattattcaccactggttgcggtaacggcagatcggtaatcgcccgcagatgcagctcaaactggctgatgctggcaccgttttgtgtccagtgaccgctgttatgcacacgcggtgccagttcgttgatcaacagaccttgcggggtgacaaaacactccatcgccatcacgcccacatagcccagctcctgcataatcgcgctcagcatctcttcggcttgcgcctgctgctgtgcgttggcctgcggaaaagcgacgctggtgcgcaaaataccgtcctgatgcaggttatgcgtcagcggataaaacacggtgctgccatcaaagccgcgcgcgccaaccaggctcacttcaccagagaagttaatgccctgctcgacaatacattcgccgtaacactctgccggtaactgttcggtttcatttgcgcgtaaacgccattgaccgcgaccgtcataaccaccagtgcgacgcttaacaatcgccagctcacctaaacgatcaaacaccgcaggccactcgctgcgttcggcaagtaactgccacggtgcagtcggcaggtggagcttatcgaaaagctgcttctgagtcagacggtcagcaataatcgggaacacatcgcggttcacaaaggccggatggcgcgccagctcgcgggttaatgcggtttccggccagcgttctatctcagcggtaatcacgctttgttgaaaaggcaccgccgccggttcagcgtccagcccgactggccagacagcaatgcctaacggttcgcctgcctgacgcagcatacggcctaactgcccgttaccgaggacgcaaacctgtttcatgccgcacctcgcgggtccgggttttccagcacttcgtcggtctgggctttgcgccagtcattcagacgctggtgcagttctttatcatgagtcgcaagaatttgtgctgccagtaacgccgcgtttgccgcgccagctttaccaatcgccagcgtacccaccggaatgccgcgcggcatttgtacgatggagtagaggctatcgacaccgctcagtgcggcgctctgtactggcacgcccagcaccggcaccagcgttttggcggcaatcatgcctggcagatgcgctgcgccgcctgcgcccgcaataatcacctgataaccgttctcttcggcgctttcggcgaagctgaacagtttatcgggggtgcggtgagcagaaaccacttcaacgtggtgcgggacattcaggatttcgaagatttcggcggcgaactgcatggtagcccagtcgcttttggaccccatcacgatggcgacacgcgccggattattgcgggaagacatgcgtcttaaaactcctgtggtgcacaactctcggctttagagggcacagagaatagcacggaaagagagcaaggaaaacggttgcgtggctgtgaaatcagcaaagttgcgggttttttaaaacggaaaatgaatcagctcaacgtcatccgccgtgactttcaccatactaccttccgtatgccaggcacccagtaccacgcgaaaagcaggttgctgattggcgataagttcatgcaccgccgggcgatgggtatgcccgtggatcagccattgcacctgatgtttttccatcgcactgaccaccgcgttttggttaacgtccatgatcgccaggcttttactgctgttggcttctttgctgttcgcgcgcattcgcgcggcaatgcgtttgcgcacaaacaacggcagggcgaggaatagcgtctgcagccagggtttgtggaccttggcgcgaaaagcctgataacccgcgtcatcggtgcacagcgtgtcgccatgcataatcaacacccggcgaccataaagttcgagcaccttttcttccggcaataacgtcatgccactttcacgggcaaagcgtttgccgagcagaaaatcacggttgccatgaatgaaataacagggaacgccggaatcggacaccgctttgatcgccgccgccatcttgcgatggagtgggttgggatcgtcgtcgccaatccatgcttcaaacagatcgccaagaatatacagcgcgtcggccttgcgggcttcccccgctaaaaaacgcagaaaaccggcggtgatcgccggttcttccacgcagagatgaagatctgcaataaagagtgtcgccacgattactcgctaacggtcacgctttcaatgataacgtcttcttttggcacgtcctggtgcataccgctacgaccggttgcaacacctttgattttgtctaccacgtccatgccgtcaaccacttcagcaaacacgcagtagccccaaccttgcaggctttcgccagagaagttcaggaagtcgttatcaaccacgttgatgaagaactgtgcagttgcagagtgcggagcctgagtacgtgccattgccagcgtaccacgggtatttttcaggccgttgttggcttcgtttttgatcggttctttggtggctttttgtttcatgcccggttcaaaaccgccgccctgaatcataaagccgttgataacacggtggaaaatggtgttgttgtaaaaaccttcgcggcagtagtccaggaagtttttaactgtttcaggtgctttatcgtcaaaagttttgatgacaatatcgccgtgattggtgtggaaagtaaccatttttgcatcctgttccgtttgattggtgcttcaacccagttcgggtcatatatagggtggtgttatagcataaccgcacgatcggatcatcacgcaatgtatgctgattcgcgcgggaaatatgggtattatacgcaactcaattacccacacatgtctaaacggaatcttcgatgctaaaaatcttcaatactctgacacgccaaaaagaggaatttaagcctattcacgccggggaagtcggcatgtacgtgtgtggaatcaccgtttacgatctctgtcatatcggtcacgggcgtacctttgttgcttttgacgtggttgcgcgctatctgcgtttcctcggctataaactgaagtatgtgcgcaacattaccgatatcgacgacaaaatcatcaaacgcgccaatgaaaatggcgaaagctttgtggcgatggtggatcgcatgatcgccgaaatgcacaaagattttgatgctttgaacattctgcgcccggatatggagccgcgcgcgacgcaccatatcgcagaaattattgaactcactgaacaactgatcgccaaaggtcacgcttatgtggcggacaacggcgacgtgatgttcgacgtcccgaccgatccaacttatggcgtgctgagccgtcaggatctcgaccagctgcaggcaggcgcgcgcgttgacgtggtcgacgacaaacgcaacccaatggacttcgttctgtggaagatgagcaaagagggcgaaccgagctggccgtctccgtggggcgcgggtcgtcctggctggcacattgaatgtagcgcaatgaactgcaagcagctgggtaaccactttgatatccacggcggcggtagtgacctgatgttcccgcaccacgaaaacgaaatcgcgcagtccacctgtgcccatgatggtcagtatgtgaactactggatgcacagcgggatggtgatggttgaccgcgagaagatgtccaaaagcctgggtaacttctttaccgtgcgcgatgtgctgaaatactacgacgcggaaaccgtgcgttacttcctgatgagcggccactatcgcagccagttgaactacagcgaagagaacctgaagcaggcgcgtgcggcgctggagcgtctctacactgcgctgcgcggcacagataaaaccgttgcgcctgccggtggcgaagcgtttgaagcgcgctttattgaagcgatggacgacgatttcaacaccccggaagcctattccgtactgtttgatatggcgcgtgaagtaaaccgtctgaaagcagaagatatggcagcggcgaatgcaatggcatctcacctgcgtaaactttccgctgtattgggcctgctggagcaagaaccggaagcgttcctgcaaagcggcgcgcaggcagacgacagcgaagtggctgagattgaagcgttaattcaacagcgtctggatgcccgtaaagcgaaagactgggcggcggcggatgcggcgcgtgatcgtcttaacgagatggggatcgtgctggaagatggcccgcaagggaccacctggcgtcgtaagtaattgcgctattgccggatgcgagttttcgcatccggttatcgtctgcgccaccacaacattcccatcagtagcatccccggcaaccacacccacatcaattcagaaataatcacctgatgcccgtacggcgtggtgtaacgagacaatgcaaacggcgcgacttttatcacctgccagggagcgaaaaagcgttcatcactccacggccacagccagccaacgcctttaccgccagtggttacgctatccagcaagctgtggcttagcaagctgacggttaaaaacagccagcagcgaatcagcccagccctgaaccatcggcgtccaataaacacacataacagcgggacaacaaacgcaaacaccaggctatgggtaaacccgcgatgaccaaaaacattgccgtaagcaacgccaaatttaaagctcaatacgtcggcgtcgggcagcatcgccaggatgattccggcaaataacagacgcggagggatgactttgctacccaaccctaaaccaatgcataggggaacggcggcgtgcgtaataacggttggcatgatggtcgcttcggcaaaatgtcgatgctatcagcatggatgaacggggcgtagagggcaaaagtctgaaaagagaaccggcctgttgatacaggccgggaaagggatcaggcaacaacctgtacgctgtgacctgcaaaactcactgtctgaccggcgacgattttgcagcgtttgcgcgtttcaaccgcaccgtcgactttcacctggccttcggcaatcgcgattttcgcctgcgcgccgctttcgctccagccttccagtttcagcaagtcgcacagctcaacgtgcggatgtttacctaaagaaaatgtcgccatgttactcatcctgtggatcatgatattcaacgcacgcctgtagcgtgttttcaatcagcgtggcaaccgtcatcgggccaacgccgccgggaacaggcgtaatgtaactggcgcgtttagccgcgtcttcaaacacgacgtcgcccacaactttgccattttccagacggttgatgccgacatcaatcacaattgcgccttctttgatccagtcaccgggaataaagcctggcttgccaacggcaacgatcaatagatcggcattttctacgtgatgacgcagatttttagtgaagcggtgagtcactgtagtggtgcaacctgccagcagcagttccatgctcatcgggcggccaacgatattgcttgcgccaatcaccacggcgttgaggccgaaggtatcaatgttgtaacgctcaagcagcgtgacgataccgcgcggggtgcagggacgcagacgcggcgcgcgctggcacagacgaccgacgttgtaaggatggaaaccgtccacgtctttgtccggatgaatacgttccagcactttgacgttatcaatacccgccggtaacggcagttgaaccagaatgccatcgatggtgttgtcggcattcagcgtatcgataagctccagcagctccgcttcgctggtggtttccgggaggtcataagagcgggagacgaacccgacttcttcacaagccttgcgtttgcttgcgacataaatttggcttgcagggttactacccaccagcacaacggccagtcctggtgcccgcagtccggctgcaatacgcgcctgaactttttgagcaacttcagagcgcacctgctgcgcaatcgttttaccgtcaataatctttgctgccatcagagagaggattccatctgttacgtagatcgaaggggatgcgcctattttgtcagaagcggggcgcgctgtcaggtttcgtttcagatttatcgcgtgaagcgacctcttgcgaaggtgaggcgcaccgtcgctgagactgaaagcttcatttttcgtccatgatggcgttgtaaatctggaactgatttatttccttgtctaaggattaagataatttaagaaatacctgacaatataaaaagaattttcagcctggtaatttaccgcttcaggtctatatttgtgttgaatatattttgcgcggaagtattcatctaacggggctctctattttttagaatagagtgcatattttcaattaagacattcttagaggataaaaaggaatttactactatcagtgtcttaaataaagtaatcggttatatacggatgtggagtcgataaatgagattgaaggaatatatatgaaattaagatttattagctctgcgctggctgccgcactattcgccgctacgggtagttatgctgccgttgtagatggcggtacaattcactttgaaggcgaactggtgaatgctgcctgtagtgtgaatactgacagcgcagaccaggttgtcacactcggtcaatatcgtaccgatattttcaatgctgttggtaatacctctgcattaattccattcaccattcagttgaacgactgcgatcctgttgttgccgctaatgctgccgttgcattttctggtcaggctgatgcaatcaatgataatttattggccattgcatccagtaccaatacaacaacagcaacgggtgtcggtattgaaatacttgataatacatccgcaattctcaaacctgatgggaatagcttcagtaccaaccagaacttgatccccgggaccaacgttcttcatttttctgcacgttataaaggcaccggtacaagtgcaagtgcagggcaagcaaatgctgacgcgacttttattatgagatatgaataatcaaaaccacgttgttttgaattatatatcacgtcttataacaaagtaatgtaccggttgtctgaagcggtatggtggcaatgtaaatcgaaatcatgttcactttgtatcatgccgctttattaaatgaaaagggaatgatgtgttgtaagaaaccaaagcaatcatttctttatattccttatttttgccgtcaggaatacacaaggcgtattaactatgatgactaaaataaagttattgatgctcattatattttatttaatcattagcgccagcgcccatgctgccggagggatcgcattaggtgccacgcgtattatttatcccgctgatgctaaacagactgcggtatggattagaaatagccataccaatgagcgctttctggtcaatagctggattgaaaacagcagcggtgtaaaagaaaagagtttcatcattacaccgccactgtttgttagtgaacccaaaagcgaaaatactttgcgtattatttacaccggtccaccgctggcagcagatcgtgagtctctgttctggatgaatgttaagacgatccctagcgtagataaaaatgcattgaacggcaggaatgttttgcaactggcgattttaagccgcatgaaattatttctccgtccaattcaattacaagaattacccgcagaagcgccggacacactcaagtttagccgatccggtaactatatcaatgttcataatccaagtcctttttatgtcaccctggttaacttacaagtgggcagccaaaagttggggaatgctatggctgcacccagagttaatagtcaaattcccttacccagtggagtgcagggaaagctgaaatttcagaccgttaatgattatggtagtgtaactccggtcagagaagtgaacttaaactaaccgaatcatctgacaatatcagagctaattatgaaaatacccactactacggatattccgcagaggtatacctggtgtctggccggaatttgttatagttctcttgccattttaccctcctttttaagctatgcggaaagttatttcaacccggcatttttattagagaatggcacatccgttgctgatttaagccgctttgagagaggtaatcatcaacctgcgggcgtgtatcgggtggatctctggcgtaatgatgagttcattggtagccaggatatcgtatttgaaagcacaacagaaaatacaggtgataaaagtggtgggttaatgccctgttttaaccaggtacttcttgaacgaattggccttaatagcagtgcatttcccgagttagcccagcagcaaaacaataaatgcatcaatttactgaaagctgtacctgatgccacaattaactttgattttgcagcgatgcgcctgaacatcactattcctcagatagcgttgttgagtagcgctcacggttacattccgcctgaagagtgggatgaaggtattcctgctttactcctgaattataatttcaccggtaacagaggtaatggtaacgatagctatttttttagtgagctcagcgggattaatattggcccgtggcgtttacgcaacaatggttcctggaactattttcgcggaaatggatatcatagtgaacagtggaataatattggcacctgggtacagcgcgccattattccgctgaaaagtgaactggtaatgggagacggcaatacaggaagtgatattttcgatggcgttggatttcgtggtgtacggctttattcttctgataatatgtatcctgatagccagcaagggtttgccccaacggtacgtgggattgcccgtacggcggcccagctaacgattcggcaaaatggttttattatctatcaaagctatgtttcccccggcgcttttgaaattacagatttgcacccgacatctagtaatggcgatctggacgtcaccatcgacgagcgcgatggcaatcagcagaattacacaattccgtatagtacagtgccaattttacaacgcgaagggcgtttcaaatttgacctgacggcgggcgattttcgtagcggtaatagtcagcaaagtagccctttcttttttcagggtacggcactcggcggtttaccacaggaatttactgcctacggcgggacgcaattatctgccaattacaccgcctttttattagggctggggcgcaatctcgggaactggggcgcagtgagcctggatgtaacgcatgcgcgcagtcagttagccgacgccagtcgtcatgagggggattctattcgcttcctctatgcgaaaagcatgaacaccttcggcaccaattttcagttaatgggttaccgctatagcacacaaggtttttatacccttgatgatgttgcgtatcgtcgaatggaggggtacgaatatgattacgacggtgagcatcgcgatgaaccgataatcgtgaattaccacaatttacgctttagccgtaaagaccgtttgcagttaaatgttagtcaaagtcttaatgactttggcagcctttatatttctggtacccatcaaaaatactggaatactagcgatagtgatacgtggtatcaggtggggtataccagcagctgggttggcatcagttatagcctcagttttagctggaatgaatctgtagggatccccgataacgaacgtattgtcggacttaatgttagtgtgcctttcaatgttttgaccaaacgtcgctacacccgggaaaatgcgctcgaccgcgcttatgcctcctttaacgccaaccgtaacagcaacgggcaaaatagctggctggcaggtgtaggtgggaccttactggaaggccacaacctgagttatcacgtaagccagggtgataccagcaataatgggtacacgggcagcgccacggcaaactggcaggccgcttacggtacgctggggggcgggtataactacgaccgcgatcaacatgacgttaactggcagctgtctggcggtgtggtcgggcatgaaaatggcataacgctgagccagcctttaggggataccaatgttttgattaaagcgcctggcgcaggcggtgtacgcattgaaaatcaaactggcattttaaccgactggcgcggctatgcggtgatgctgtatgccacggtttatcggtataaccgtatcgcgcttgataccaatacgatggggaattccatcgatgttgaaaaaaatattagcagcgttgtgccgacgcaaggcgcgttggttcgtgccaattttgatacccgcataggcgtgcgggcgctcattaccgttacccagggcggaaaaccggtgccgtttggaagtctggtacgggaaaacagtaccggaataaccagtatggtgggtgatgacgggcaagtttatttaagtggtgcgccattgtctggtgaattactggttcagtggggagacggcgcgaacagtcgctgcattgcgcactatgtattgccgaagcaaagcttacagcaagccgtcactgttattagcgcagtttgcacacatcctggcagttaaaggaaattatcaataagataatctgcagattattattggcgatggcatgtttgtgtctggcaaacatatcctgggctactgtttgtgcaaatagtactggcgtagcagaagatgaacactatgatctcagtaatatctttaatagcaccaataaccagccagggcagattgttgttttaccggaaaaatccggctgggtaggtgtcagtgcaatttgtccacccggtacgctggtgaattatacataccgtagttatgtcaccaactttattgttcaggaaactatcgataattataaatatatgcaattacatgattatctattaggtgcgatgagtctggttgatagtgtgatggatattcagttccccccgcaaaattatattcggatgggaacagatcctaacgttagccaaaaccttccattcggggtgatggattctcgtttaatatttcgtttaaaggttattcgtccctttattaacatggtggagatccccagacaggtgatgtttaccgtgtatgtgacaagtacgccttacgatccgttggttacacctgtttataccattagttttggtggccgggttgaagtaccgcaaaactgcgaattaaatgccgggcagattgttgaatttgattttggtgatatcggcgcaagcttatttagtgcggcagggccgggtaatcgacctgctggtgtcatgccgcaaaccaagagcattgcggtcaaatgtacgaatgttgctgcgcaggcttatttaacaatgcgtctggaagccagtgccgtttctggtcaggcgatggtgagcgacaatcaggatttaggttttattgtcgccgatcagaacgatacgccgatcacgcctaacgatctcaatagcgttattcctttccgtctggatgcagctgcggcagccaatgtcacacttcgcgcctggcctatcagtattaccggtcaaaaaccgaccgaagggccgtttagcgcgctggggtatttacgcgtcgattatcaatgaggtacggagaatgagaagagtactctttagctgtttctgcgggctactgtggagttccagtggatgggcagttgaccctttaggaacgattaatatcaatttgcacggtaacgttgttgatttctcctgtaccgtaaacacagcggatattgataagacggtagatttaggcagatggcctacgatacaactactgaacgctggcgataccacggcactcgtcccttttagcctgcggctggagggatgtcctccgggtagtgttgcgattttatttacgggaacgccggcatccgataccaacctgctggctctggatgatcccgcaatggcacaaaccgtcgccatcgaattacgtaatagcgatcgctcccggctcgcactgggggaggcgagcccgactgaggaagtagatgcaaatggcaatgtcacactaaacttttttgccaattatcgagcgttagccagcggtgttcggccaggtgtggcgaaagcggatgcgatatttatgatcaattataattaatattatattaattcgtataatttggcgtagtcgataagctctacaatactatgcaaacctagcttgccataaatattagatttatgcgcactaactgttttattgctaagtaataacttatcggcaatttctttattagataatccgctaaccagataacgtaatatggtcacttcacgattagatagcacagtgaccgtactactattcgtactacatttattgctttttatatagttaagcgtttcgctgggaaaaaacgtgtatccggagaggatcatctgaacggcatgaaaaatatcattctgatcattgcatttactgacaaaaccgttagcaccagcttgtatcgctctgccagcataaaagcattcacttttgctacttaaaaataacactttcactgtgctctggatttgtttgatccttttcaggaaggtaaaaccgtctgttccgggcaagtctatatccataatgattaaatcaacaggacgggttcggagataatcgatggttatgcgataatcatccgttttcaggacaatctgcaattcactgtttttttgcaacagaacttcaatagacattctgatgataggatgagtatccataatgatcacgctcgttggtttcatagttaccagtctcataggagcggacaattttccgttaggtcgggaaattgtactttgatacatgaaaatacgggttttcttgattcagacgcgcagcggtgtgcgtttgtttgccgctatagcgaaataaatcagaaaatcagacgcggtcgttcacttgttcagcaaccagatcaaaagccattgactcagcaagggttgaccgtataattcacgcgattacaccgcattgcggtatcaacgcgcccttagctcagttggatagagcaacgaccttctaagtcgtgggccgcaggttcgaatcctgcagggcgcgccattacaattcaatcagttacgccttctttatatcctccataatttcagagtgggacatatttgggacattatcaccaaaaatgtcgtctattttcctcgcatgctctgtcaaatgattaggcgcaaggtgagcatacctacgaaccatttctatggactcccatccgcccatttcctgaagcactgataatgggacgcctgactgaatcagccagcttgcccaggtgtgtctgaggtcatggaaacggaaatcttcctcatttatgcccgtcttatccgtttccgctttgcccttcaccacatcactttttgtcgctgtttggcgagataattcaacggtgtcaggccgtaaaacgccttaaaaacagagataaagtagctcgtgctgctatagccacataattgcgccacctgagtgatatttttgttatccatcaataacatctgtacggcgtaacgcatacgacactctgtgacaatctggctatagctggtattttcgttttttaatttctttttgagcaggctggggcttaaacataggctactggcgacaattcgcagattccagtaatgctgaatatcgctttgaataatgcggcagacgctgtcgcggacgctgctgcgtaagatatacatcagtagggcaataaaccggctttgctcaagaaagttagacaatacggtaaaaagcaatgcgcgcgtcaactccgcttcgcagggtctgctgggttgctgcttgctgtggttggcggctagccggaacacttccggtgtacggctatgacaagcgataaccggggttgccagccggctccagggctttacacaggttaagttcttatttaaaaacaacagataatcgttgatgatgttacggttgatgtgggtgattaatacgtgatttaacgtactgagttcaatgacgttattgttgcacgcgaaggcggccaggtagtttttcggaagggtaaacgtagcatggttattgacgcttacctctacctctttttcggtcaggatcaccacgcaaggttcactgctgctcaattgcatttcgcactcctcagatatcagaaactccgctcaaaggatctatgcttcctgcatgagtgatcggcccgttcgccgataacgatcttctttctttagcacgctttttagcaattaatcttgatggaattctgatgagagcgaaagaggtaagccaggtcgtacccgacttacctggaggagatttaatactcgagaatgccgtgcgcgacgggcaaatagcgcagagagaaatagagagtgtctttaccgcaagaggaacgtttcgctaacaggctggcaatttctgcgtccggtttcggtttcgctgtaaaggttttgcctttgccggcgacaaaaagttcataaacaacgccgctggcaggggcgggactttggcaatcggcgctggcctgtaaataacgttcacgctgttcagcggtcagtttatccacgccgctgccatcctgtacccagacattaacgccggttgctttaacgtgttccagcagttggcgatagccatcggggctcatgtttccggcgaaaaaactactgatataaaccggttttgcactaacatcgctaatcagccgctgcgcgttgtttaaccatgttagcaaaggctgacgggcggcttcgctgcgccagttcaggtcgtcaatttccgcgctgatgtaccagccatccggcgttatgccaggcgcggcgctccataatctggcttgctggagatcggcagccagcaggcgattaagatagctttccagcgctgcggagctctgtttctggtgcataaaaaattccggatcggcgttcagcccgacaataagcttcagaccagcctgttgcgcagctgcggcccgcttaaacaataacgtgcgctgttctggctgggtaaatgcatcgccgtaacgggtccattgcaaaacaagggtatcgaagccttgcaaacgtaactgactcatcagcccctgccactgggtatcggtaacctgactatctcggttttgtggttgccagataatacctttcatcgcaaaggaaaaagggctgaccaaaagcagtgtcagcaatacgaaaatgaacttacgcatttaccagtgcactccaatggtgagaaacgcgttgttgcgctctccgttacgttgattaatcgccttaaaggtatgttgatactcgacgccgagactgactttgtgcggccaggcgtcgtagtgcgtctcgccggtccagatattccagcggaccccgactccgccaagctgcgcgccctgagtgcctttatcacgatagccgttgtcctgaacgtgagcgtaaggctcaatagtctgtccgttagctaccttctgatgccagctgacgcgataatctgccgtccacgcctgaatatcctggcggatatattgcgccgcatcgaggtacaggttttgggcaaaccagccactaccgttcgggtgccattcgtcgctgtatttgccgccattaaagaaactggcgctggcgcgcagcatggtatcggatgcgccattttggccgttcagcggcaactgctgttcgacggcgatgaaaaagatctgatcgcgcagcggcttccagcgcagaccggtgccggacatcggatttttcaccggcatcatcaccccgttttctccggtatcggcaaagacgcggctataaacactgagcaggtcgccttccagcagcatattgcgtccgatgcggtactcggcttccagttgtccgtagctacgatagcttttccctggcgctgcgccgccgacattattgttagcggtactcattgcgccggaacgcaagccgatggaagaatcgaaactgaacgtccagcggcgaccgacctcctcatgcaaacggcggaaattgaagcgttgttgattttgttctggggtcagtggggttatcagcgcctgattatcaatgtcatcaatcaccagccgggcgtagtgctgcgtcgcaggcatgtcatccagacgctggttcacgtaggccagttgtcggatcagtgccggatcgtccggaagccctttatgcgccggttcgagcatttcccggctctgtgcgatatcaccgctatcccacaaggcgtaaccaagcgctgcctgggtgttgctattattcggttccagttccagcgcggcgcgcaaatcactcaccgcggccgggacattatgacgttggcgataaattgtcgcccgcgcaacgtaagcgttggcagaaggcgcaatattgatactgcgcgtgagatcgttcagtgcgagttccggctgaccaggaatgtaacgttgcgcatgcagccaccagtagagggcattgcttcccagtccacgtttttctgcctgttgtagccagcgatcgcgagccgcaccatttcctgccgcctgggcggtattggcagcagcaagcagatcctcattgctcatgtcgtgaagactgattttctgccaggccgccagtgcggtggcgtagtcctcaacctgatacgcctgataggctaccgcacgatgttgccaggcgctcggttgtcgttgttcggcctgaagccatgcatacaacgccacaccgggtagcgtgtcccgataacactttgccagacggttccaggcggcggcatcgtaggaagggctcatatcgcccagcaagcgaactattgccgggcaattatctgcaatacccggcaactgactttgccactgacgttgctccgccagcggtaagggtttgcttaaaatcgccaccttcgccggcgttgccaggtaaggatgactttccagcagagacgccagtcgcgccattaaagtctggctgacacgcgcatcgccctggaaaggatagcgttgcagcaataaatcggcagcttcgcgactctgctcgttctgcatcagttgccaggttagttgatccaggcgggtaagatttgccggttcttgctgatacagcaatcgtgccagacgcagagcttcagccttgttacgggtcgccacgctgacagcataacgctcctcaagcatttcattggcggggagggtggcgagcagtttttgcgctgcgtcgtactgaccttcttttaacagcaccggtagcgtcgcgccaacaacatactggcggttgtcggcaaactgtaccgtataattcgccaacgcctgaacggggttagcgctgtatttagataacagatagagccaacttttctcttgtgcgtccgtggtaaatagtggcttattttcaatgagataatgctggaggcgtgctttttcgccacgataagccagcgcggtcgcgtaagtaatataactctgaggatcggtgaagatcccctgactttgcagtgccaggatccgatcgtccagctgcccggcaagaagcacgtcaaaccactgacggcgttctgccgcgcttaatgtgttctgctggcgtgcttcattgtatagcgtatctgcctgggaccattgtttcaggtagattgcccgttgcagcagatcggttcgcagcgtttttccttccgggcttgcagcaaacgtcgcatcgttcagttgcgctctggcgacaggtaactgtgccagccgcagggcattctgcccgacttcactgcgacaacgcagggtcggcgcagcatcgcacgctttttgctgggcaagcagttcttcaactgtcgtaacgcttttcacttcaaccggaatagccgccagactgcgctcaagtcgggcatctcctgggtgacgtttcagttgatcctcaagcaacagccgcgcccggtcatcatgaccaaaatggcgataggcttccgcaaggtataaagtcagcggaatattatccggcacctgctggtgtatatattcaaattcgcggatggcggttgcttcgtcgttatttttctgtgccttcagcgctttatcgagacggggataaataacaaaatggcgataatcgctcagccccagctcttctgcgctggtgccgatattgtctgcgagtgcgctggtactcaataaagacgtcagcagtaaaccagaccatccgatgacgcgattaaggttattctccttcattttcggactccagttgcgcaacctgttctgtgtttaaacctgctttgagtaatagactttgcatgctaacttgtaattcgcgttgaattgtcaggacgcgatccaacgtttcctggctgataacgccttcggtgaccaaaaacttgccgagcggcagagaactgcgttcatggcgcaataacaacacgttaattgcactacgattaatatgaccgagcgtggtcagtatttcggcgaacaggaactgatgcggcacatattgccgccagatttcaccggcctgctgttccgtgagccactgatgctgaaccgcattgtacaacattgcccgcggatcgtgaccgcgtcggcgtgcataccagtgacgtaaccctgtgacaatttgtccccgcagaacaatgacgtaacgcactttgcgtccgactttacgcgtcagggccgccaggctaaccgggtcaataccatcttcactgccgacaattaactcgtcattttccagacgcagcggcagtaccgcataatgcagcgccacggaggccggcatttcggcaatcaggctggaagggatctgccaggcatcgatggattcccacgccacgccgttttgctctgccagcgcctgtgccagctgctcggcgctaatcagcccctgcatcagcatactaccgcccaggcgtagaccttcgacgcgattacgcagtgctgtatcgagttgttcttcagtgatgacctgattttccagcagaatttgacctaacgggcgcaagctgcgggtatcgccagtcacgctggggaagtcatgcgttgttttatcccacgccacgcgacgtggatcgccgtgttgaagtacctgttttagcgcgcgccagttggccatgaagttaatcaggttgccccagaaaagacgcaggacggaaagcagcccctgcgtcaggccgtagtagccagtaacgaaaatcacccgctgcacgatgcggttaaccatcaaaccaaagtttagccacagcagggtcattaaccatgcgctgccgctgaaaatagaaaggaaatgccaggcatcgggccacaaactttcatacgccagcaacagcaaaagctggatcatcaccagcatcgcgaggaagctgacaaagttactgattgcccctttgcggtcgcgccagagaaagtagttcagcgtcaggctggaggtccatttatgggttttaaagccttggaaaacaatgccgatgatccagcgggatttttgtcgaaccgcagtgctaaaggtatcggggaaatattcgcgcacgcagatcatgttacttgtccgcgcgtgctgtaaaaatttacgctgctcgcgttctttggcttcgtccaccaccggaaaacggacaaaaatttccgtcatacctttttctttcaggcggaagccaatgtcgtaatcttcagtaagactctgcacgtcgaaagcaataccgtcaccgtcagctaacagtgcggtcacggcgcggcggctgaaacaggtgccgacgcctgcgctgggcacttgtccggcgagggcttcacgcaccggaacatctttgccatgcagctcactaaactcatcaatgtaagtcatgctggtgaagtgcgtccattcgcgttcgaacggatacaccgggatctgaatcagatctttacgctcgaccagatagttgaacagacgcaattccatcggactaatcacatcttcggcgtcatgcagaataaaaccagcaaaagcgaaattggcgctacgctcaaattgggtgatggcgtccagcacgttgttcagacagtcggctttgctggtggggccaggacgcgcgcagactaccttatgcacattcgggaagcgagcgcacacttcgtcaacatcacgctgagtatcggggtcgttggggtaggtgccaacaaagatatgatagttttcgtagtcgagcgtggtcgccgccagctcggccatattgccgatgacgcccgtttcattccacgccggaaccataatcgctaacggtttttcatctggtttatacagttcgcggtaactcattcgcgggtagcggcgataaacactcaacttgcgtttaatgcggcgtacccagtagacgacatcaataaaaaaatcgtccagcccgctgatgaacatgatgaccgctaacgttatcgcgattacttttaagccgtagagccaggtagcaaaaacatcaagaagccagtccacacaaaaaccttacattaacgctggttatgtttagggtggcgtatattaaggttttttatgaattgtgacagctttttaccattaataggtatgactattgcggcacgttatttttacactggttataaaagttgccgtttgctgaaggattaagcgggtaatgtgataacaaaccttgtcccccgcgcatcgctcgttaccgcaaccgtgcctttatgcgcgacaacaatgcttttcactatcgccaggccaataccgctaccttcaccttttcgctggcgggaggggtcaacgcgatagaaacggtcaaacaatcgcggtaagtgctcgggcgcaatgggcgtaccggggttttcgacgataacttgcaccaggtgatcgaccgtctgacagcgcactacaattgtctctccggttggcgtataacgcagggcgttgctaagcaggttgcttagcgcccgacgcagcatcagcggatcgcccgcgacctgacacttgtcgccaacaaaccgcaactccacgccgcgatcttccgctaacgcctcgaaaaaatcgaacactttgccgacttcatccgccaggttgagcattttcttttcggggattagctggttgttatcggcctgagcgagaaacagcatatcgctgaccattttcgccattcgcgtcagctcttcgagattagagtagagcacatcttccagctccttctggctgcggctctggctgagggcgatttcggtttgcgttatgagattcgtaattggtgtgcgaatttcgtgagcgatatccgcactgaaattggactggcgggtaaagacatcctcaatacgctcgatcatatggttgaagctcagtaccagctgttccagctcaatgggcacggtctgcgggtcgaggcgaacgtcgagatctttgctggtaatattctggatttgacggctgacgctgcggatcggcgcgtgacctttatgtaccgccaacagtacgataaagacgatcaggatgctgattacgcttgcggtcataataagtttattcatcaaatcatttatgtaatgaagatgaaaatcgatgctaagcgcgatgtagagcgtataaatcggtttgccgtccaccaacgggccaaccggcaagttaatcatccgccagttgctgtgttccatatgcccgtgaccgtggcctggcatcatcatcgtcgggccggaaaggagatacacctcgccaccctgagcgtctttatcgggtatggcgtcacgcgtaaactcgcggatatccggcgcaccgggggagtgatacaccgttttaccctgactatctgccagggaaatcaacacattggaataaccactgacgatatcttccagcgtcattaagcgtcgggcttgcgtttcgtcagggtgatttagtacccgttcaagggtggcgctaatctcttttaaatcattaatatcctgctcggcaaaatgaacttttacactgtggatcatgatccatgcaaaggcgaaaaacgccgcgatggtggccaggctgataaaaaaggtcaggcgggttgccaggctaaacgggcgctgaaatggcttactgaccatccggcacctcaagcatgtaacccacgccgcgcacggtctgaattagcttcggctcaaagtcgttgtcgattttgccgcgcagccgcttcaccgccacatcaatagcattggtatcgctgtcaaaattcatgtcccatacctggctggcgataaggctgcggggcagcacttcgccctgatggcgaaggaagaactccagcagagtaaactctttactggtcaaagtgatgcgcgtgccgctgcgggtgactttgcggctgacgagatcgaccatcaaatcggcaacctgaaactgactttcgataatcaccgccgccccgcgccgcagtaatgtgcgcacccgcgccagcagttcagcaaaagcgaatggcttcaccaggtagtcatctgcccccaactccagccccttgacgcgatgttcaatggtgccaagcgcggtaagcaacagaatcggcatccctttattggcggagcgtaacatgcgcacgatatcccagccgttcacgtccggcagcataatatcgaggattatcagatcataatcaccggtcatcgccagatggtagccattcagcccgttgtcggccaaatcgaccacaaaaccggcttcggttaaccctttggtcaagtattctccggttttcttttcatcttcgacaatcaacagtttcatatttcctccgcatgttgcccgggcaattctagagtagcgggatcagatggcaatcgcttattggcaaaatgacaattttgtcatttttctgtcaccggaaaatcagagcctggcgagtaaagttggcggcataaaatcaccagaaattatgagcctatgtctccttgtaaacttctgccattttgtgtggcccttgcgctaaccggttgtagtctggcaccggattatcagcgtccggcaatgcccgtgccgcagcagttcagtctcagccagaacggcctggttaacgcagcagataactatcagaacgcgggctggcgcaccttttttgttgataatcaggtgaagacgctgattagcgaggcgctggtgaataatcgggatttgcgcatggcgacgctgaaagtgcaggaggcacgggcgcaatatcgtctgaccgatgccgaccgctacccacagctcaatggcgagggcagcggcagctggagcggtaatcttaaagggaataccgccacgacacgggagtttagcaccggccttaacgccagctttgacctcgattttttcggtcgcttaaagaacatgagcgaagccgagcgacaaaattatttagccactgaggaagctcagcgcgcggtgcatattctgctggtttctaatgtcgcgcaaagctatttcaatcagcaactggcgtatgcgcaattgcaaatagccgaagaaacgctgcgtaattatcagcagagttatgcgtttgtcgaaaaacaactgttgacaggtagcagtaatgttctggcgctggaacaggctcgcggggtgatagaaagtacccgcagcgacatcgctaaacgtcagggggaactggcgcaggcgaataatgcattgcaactgttgctgggaagctacggcaagctgccgcaagcgcagacagtaaacagcgacagcctgcaaagcgttaaattaccggcgggattgagcagccaaatcttattgcagcgcccggatattatggaagctgaacacgcgttaatggcggctaatgccaatattggcgctgcacgcgcggcattttttccgtctataagcctgaccagcggaataagcaccgccagtagcgatctaagcagtttatttaacgccagcagcgggatgtggaattttatacccaaaattgagatccccatttttaatgccggacgcaaccaggccaatctggatatcgccgaaattcgccagcagcagagcgtggtgaattatgaacagaaaatccagaacgcctttaaagaagtggcagatgcgctggcattacgtcaaagcctgaacgatcaaattagcgcccagcagcgttatctggcaagcctgcaaattactttgcaacgggcgcgggcattatatcagcacggcgcagtaagttatctggaagtgctggatgccgagcgttctttatttgcaacccgacaaactttacttgatctgaattatgcccgtcaggttaacgaaatttctttgtataccgcacttggtggcggttgacagcaatatactcgtcatacttcaagttgcatgtgctgcgtctgcgttcgctcaccccagtcacttacttatgtaagctcctggggattcactcgcttgtcgccttcctgcaactcgaattatttagagtatgacttttaactccaggagagaataaatgaaaaaagcactgcaagtcgcaatgttcagtctgtttaccgttattggctttaatgcccaggctaacgaacatcatcatgaaaccatgagcgaagcacaaccacaggttattagcgccactggcgtggtaaagggtatcgatctggaaagcaaaaaaatcaccatccatcacgatccgattgctgccgtgaactggccggagatgaccatgcgctttaccatcaccccgcagacgaaaatgagtgaaattaaaaccggcgacaaagtggcgtttaattttgtccagcagggcaacctttctttattacaggatattaaagtcagccagtaacccaggtttaatgagatgaaaaaaatcgcgcttattatcggcagcatgatcgcgggcggtattatttctgcggcaggttttacctgggttgcaaaggcggaaccgcctgcagaaaaaacgagcaccgcagaacgtaaaatcttattctggtacgacccaatgtatcccaatacgcggttcgataaaccaggtaaaagcccgtttatggatatggatctggtgccgaaatatgccgatgaagagagttctgcgtctggtgtgcgcattgacccgactcagacgcagaatctgggggtgaaaacggctaccgtcacgcgcggaccgctgacttttgcccagagtttcccggcgaatgtcagttacaacgagtatcagtatgccattgtgcaggctcgcgctgccgggtttatcgacaaggtgtatccgcttaccgtgggcgataaagtacaaaagggcacaccgcttctcgacctgaccattcctgactgggtggaagcgcagagtgagtatttactgctgcgcgaaaccggcggtacggcgacccagactgaaggcattcttgagcggctgcgactggcgggaatgccggaggcggatattcgccgcctgatcgccacgcaaaaaatccagactcgctttacgctcaaagcgcccattgatggcgtgatcaccgcgtttgatctgcgcgcgggaatgaatatcgccaaagataacgtggtagcgaaaattcagggtatggacccggtgtgggtcactgctgcgatcccggagtctatcgcctggctggtgaaagatgccagccagtttaccctcaccgttccggcgcgaccggataaaacactcaccatccgcaaatggacgctgctacctggcgtggatgccgcgacccgcacgctgcagctgcgtctggaagtcgacaacgccgacgaggcgctaaaaccgggcatgaacgcctggttgcaactcaacaccgccagcgaaccgatgctgctcattccgagtcaagcgctgattgataccggcagcgaacagcgggtgattaccgttgatgccgacgggcgctttgtaccgaaacgcgttgctgttttccaggcaagccaaggcgtcaccgcattacgctctggtctggcggaaggtgaaaaggtggtttccagcggcctgttcctgattgattccgaagccaatatttctggcgcactggagcggatgcgctctgaaagtgcgacccatgcgcattgagggaataaccaatgattgaatggattattcgtcgcagcgtggcgaaccgttttttggtgctgatgggcgcgttgtttctgagcatctggggcacctggaccatcattaatacgccagtggatgcgctgccggatctctccgatgtgcaggttattattaaaaccagctatcccggtcaggcaccacaaatcgttgaaaatcaggtgacttatccgctaaccaccaccatgttgagcgtgcctggcgcgaagactgtgcgcggtttcagtcagtttggcgactcttatgtgtatgtcattttcgaagatggcaccgatccgtactgggcgcgtagccgggtgctggagtacctcaaccaggtacagggtaagctgcctgcgggagtcagcgccgagctggggccagatgccacgggtgttggctggatctatgaatatgcactggtggatcgcagcggtaagcacgatctggccgatttacgcagtttacaggactggtttctcaaatatgagctgaaaaccatccctgacgttgcggaagtggcgagcgtgggcggtgtggtgaaagagtatcaggtggttatcgatccccagcgcctggcgcagtatggcatcagtctcgccgaagtaaaaagcgcgctggatgctagtaaccaggaagcgggcggtagcagcatcgaactggcggaagcggaatatatggtgcgcgccagcggctatctgcaaacgctcgacgactttaatcacatcgttttaaaagccagtgaaaatggcgtgcccgtttatctgcgcgatgttgcgaaggtccagattggcccggagatgcgccggggcattgccgaactaaacggcgaaggcgaagtggcgggcggggtggtgatcctgcgatccggcaaaaacgcccgagaagtgatcgccgccgtgaaggacaaactggaaacgctgaaaagtagtctgccggaaggcgtggagatagttacaacatacgatcgcagccagctcattgaccgcgccatcgacaacctcagcggcaagttgctggaagagtttattgtggtggcggtagtctgtgcgctgtttctctggcatgtgcgcagcgcgctggtggcgattattagcttgccgctggggttgtgtattgcttttattgtcatgcacttccagggactgaatgccaatattatgagcttgggtggcattgcgattgccgtcggggcgatggtcgatgctgctatcgtcatgatcgagaatgcgcataaacggctggaagagtggcagcaccagcatcctgacgccacgctggataataaaacgcgctggcaggtgatcaccgatgcgtctgttgaagtggggccggcgctatttatcagtctgctgattatcacgttgagctttatcccgatcttcaccctggaagggcaggaagggcgtctgtttggcccgttggcgttcaccaaaacgtatgcgatggcgggtgcggcgctgctggcgatcgtagtgatcccgatcctgatgggctactggatccgtggcaaaattccgccggaaagcagtaacccgctcaatcgctttttgattcgtgtttatcatccgctgttgctgaaagtactgcactggccgaaaaccacgctgctggtggcggcgcttagcgtgctgacggttctctggccgctcaataaagttggcggggaatttttaccgcagatcaatgaaggcgacttgttgtatatgccaagcacgctgccggggatttccgcagcagaggcggcgagtatgctgcaaaaaaccgacaagctaattatgagcgtacctgaagtggcgcgggtatttggcaaaaccgggaaagcggaaaccgccaccgattctgctccgctggagatggtagaaacgaccatccagcttaagccgcaggagcagtggcggccaggcatgacgatggacaaaatcattgaggaactggataacaccgtgcggctgccggggctggcgaatctgtgggtgccgccaattcgtaaccgtatcgatatgctcagtaccggcattaaaagccccatcggcattaaagtttccggcactgtgctggcggatatcgacgcgatggctgagcaaattgaagaagtagcgcgaacggtgccaggcgtagcttctgcgcttgccgagcggctggaaggtgggcgctatatcaacgttgagattaaccgtgaaaaagccgcacgttacggtatgacggtggcggatgtgcagttgtttgtgacttctgcggtgggcggggcgatggttggcgaaacggtggaagggattgcccgttatccaattaatctgcgttatccgcaaagctggcgcgatagtccgcaggcactgcgccagctgccgatcctgacgccgatgaagcagcaaatcaccctggcagacgtggccgacattaaagtctctaccggaccgagcatgctgaaaaccgagaatgcgcgcccgacgagctggatttatatcgatgcccgcgatcgtgacatggtgagcgtggttcacgatttgcaaaaagcgatagctgaaaaagtgcagttaaaaccgggcaccagcgtggcattctccgggcagttcgagctactggagcgcgccaaccataagcttaaactcatggtgccgatgacgttgatgattatcttcgtgctgttgtatctggcgttccgtcgggtgggcgaagcgttgctgattatcagcagcgtaccgtttgcgctggtgggcggcatctggttgctgtggtggatgggctttcatctttccgtggcgacgggcactggctttatcgccctcgccggggtcgccgccgaatttggcgtggtgatgctgatgtatttacgtcacgccatagaggccgtgccgagcttgaataatccacaaacattcagcgagcagaagctggatgaggcgttatatcacggcgcggtcctgcgcgtgcgcccgaaagcgatgacggtggcggtgattatcgccggtctgctgccgattctgtggggaacgggggctggtagtgaggtgatgagccggattgccgcgccgatgattggcggcatgatcaccgcacctttgctgagcctgtttattatcccggcggcgtataagctgatgtggctgcaccgacatcgggtacggaaataaaagcaggataccccgtttaaccgtgtggattgtgtcttgcgacgatgggcactaaatgttaaaaggtgcccctcaacaaaaaagacacacaggggaaaggcgtgaaaaacgcgagtaccgtaagcgaagatactgcgagcaatcaagagccgacgcttcatcgcggattacataaccgtcatattcaactgattgcgttgggtggcgcaattggtactggtctgtttcttggcattggcccggcgattcagatggcgggtccggctgtattgctgggctacggcgtcgccgggatcatcgctttcctgattatgcgccagcttggcgaaatggtggttgaggagccggtatccggtagttttgcccactttgcctataaatactggggaccgtttgcgggcttcctctctggctggaactactgggtaatgttcgtgctggtgggaatggcagagctgaccgctgcgggcatctatatgcagtactggttcccggatgttccaacgtggatttgggctgccgccttctttattatcatcaacgccgttaacctggtgaacgtgcgcttatatggcgaaaccgagttctggtttgcgttgattaaagtgctggcaatcatcggtatgatcggctttggcctgtggctgctgttttctggtcacggcggcgagaaagccagtatcgacaacctctggcgctacggtggtttcttcgccaccggctggaatgggctgattttgagcctggcggtaattatgttctccttcggcggtctggagctgattgggattactgccgctgaagcgcgcgatccggaaaaaagcattccaaaagcggtaaatcaggtggtgtatcgcatcctgctgttttacatcggtagtctggtggttttactggcgctctatccgtgggtggaagtgaaatccaacagtagcccgtttgtgatgattttccataatctcgacagcaacgtggtagcttctgcgctgaacttcgtcattctggtagcaagcctgagtgtgtataacagcggggtttactctaacagccgcatgctgtttggcctttctgtgcagggtaatgcgccgaagtttttgactcgcgtcagccgtcgcggtgtgccgattaacagcctgatgctttccggagcgatcactagcctggtggtgttaatcaactatctgctgccgcaaaaagcgtttggtctgctgatggcgctggtggtagcaacgctgctgttgaactggattatgatctgtctggcgcatctgcgttttcgtgcagcgatgcgacgtcaggggcgtgaaacacagtttaaggcgctgctctatccgttcggcaactatctctgcattgccttcctcggcatgattttgctgctgatgtgcacgatggatgatatgcgcttgagtgcgatcctgctgccggtgtggattgtattcctgtttatggcatttaaaacgctgcgtcggaaataaggcattcacgctacatccgacaaaacgatgtcaaccatccgaaaccgctctcatccattcgatgagagcggtttttttaattactgcttaaatgcacccgccagagagcgaatatcattgccggttggcgagtaatccccgcatatccggttgtcaggtcaggatggtaaggcacctgctttacactttcgcccgtggtcagtgatggctgcgggcgaatcgtaccagatgttgtcaattaatcgtgttggcacagcgttatgactatcttttcttttatctgccagtgcacagcaaacatctcattctcacgatgaatgatgacctgctgtttattccagctaattatctgatagtccagaaaacctgcatcagtttggatctcacttgccttaaatgcgctctctttggcggaaaatgccagtgtcagcgccagagaaaaggctaaaccgcagtctgcgagtcgctcgtgttccgctggtgtaataatgttgtctgtcaattctcttgcggtttgtacagaaaaaatttcttctatatcaatgccaatcggttgacgagataccacggctaatgccgtagtcccacagtggctaatactgccgtatacctccgcaggccagacaggttggcgtagctcgccgattgcgggcacacatttatagccatattcccgcaaagcataaacagcagcgatccgtccggctaaatgctctgttttacgtttacgtccagcgtgttgcagttgtgcgtagtgcggcagccagagtaaatcctgctcacaaaaattcgccggatcgaactcaacaaaatgcagcgtatgtccggcaaaggggagggaggtatgcgtagttttcatatcgaccatattcgagactgatgacaaacgcaaaactgcctgatgcgctacgcttatcaggcctacatggtcctgcaatatattgaattggcaagatttttgtaggccggataaggcgttcacgccgcatccggcatgaacgacgcgcactttgtcaacaatctgacgttagcatcagaagtgggtgtttacgctcatataccacgtacgtcccggctcgttataggtatacgccccggcaccggcgatatagttggcccctgccgaatcgcccgtggtctgggcattacccgcacgccacaaacgtttgtcgaacagattgtccacgccgccggtcagactgacattcttcgtcacatcccaggtcgcgctcaggccaacaatgctgtaaggactaatttctttggtttccggtccaaccgctggctgacctttatagttgtacttcttcggctgctgcttgccgtaccaggtgaaggtcgtttgcatgctcaaatcttcccgtgcctgccagctcagcgtactgttcaacgtatactccgggatgatgctcaaacggtcgcccgtggttttgttttcactcttcagcatataagtgatgttattggtccacatcaccgtttcgctaaccggtacgtttaagcttccttccagaccttcaaccaccgctttcggcacgttatcccactgatagagatcggtgccgactgcgttttgccctacagccacatagcccgcttcaatcttattgcgataatcgttacggaaccaggtgacgcccgccagccacccgtcgcgtttgaactccagaccaatctctttgttgatgctggtttctgctttcaggtcatcgttaccttgcagatagcagccgcccgcgctggcatagcaaccctgacctttactgtagagaatgtagttcgggttagtctggtacaggctcggcgctttataagcacgggcgatgcccattttcagcgtgaagtcatcgcctaaaccttggcttatgttcagcgccgggctccagttattgccgacaatactgtgatgatcgaaacgcagccccggcgttacgatggtgctgtcagtcagctccatgttgttttcggcaaacaggctgaaaatttctgctttactatacgggctacggtcggtggtactcacgccatcaatagcgccaccggtattcgttccggtcagtgcctgggtgttggaacttaagtccttcatccgttgctgattccactccgtacccagcgtcagcgtctggttaacgaggaaatcaatcggcaggttaacttcgctgtgcagcatcacgtcatcaagatcgatatcgacgaaatcctgtgtcgctttttcgttaaatttcccttcggtaccgcccgccagaccttccggaatacggctgttacgggtgtgttcgtactgcacccagttgctggtggtcacgccgttatcccagccaccgttccaggtcagcgcgtagttctggcgatacagacggttggtttcatcgccatatttgctgcgggtataggaatcggagttggtattctgggtgtcgcccgcatacaggttaccctggcggctgtaacctgcttccagttccaggctttgcaatggcgcgaaatcccagcgcaccacgccattaatatctttgttgattaccccttcgcgcccggctggtaacgtcgtggcatacgttccggcacgcgcggactgatggccctggttgatatcccacgcgtcagcctgggttttgtcgaggttgccatacaaacggaagctgaattcgtcgcccagcggaccggtcaggctaaagttagtgcgtttggtggcaccttcctctttatgttctggcgcattgaaatatgcgtcccaggagccgtgccactcgccgctgccttttttggtaatgatgttaaccacgccgcccgccgcgccgttgccataacgcgcagctgccggaccacgcagaacttcaatacgttcaatcatttcaggtggcacccaggaagtatcaccacgggtatcgcgctcgccacgccagccctgacgcacgctgttacggctgcttaccggcttgccgtcaatcaaaatcagcgtgttttccggacccataccgcgaatatcaatctgtcggttattcccacgctgaccactggtggagttaccggtcaggttaacgcctggcatggtacggatgatcttgctcacatcgcgggcaaccgggtttttgcggatttcatctgcggtgatggtgctaacgccaggcgcctgtaagttctgctcggcggcggtaacgacaatagtatcgtcatgactaacaggagtatcggtcggctcttgtgcctgcgctaccccataaatccccagattgaccaacaaggccagggaatgaatcttcttgttcattgttttattcctgcatttttgccacgaattgcaactgtcgggcatggtcgtcatcaacacgacgcatcccgctaccgcgaaaacctttgatcctgaaagacacgcagtgcagttggttaattaatgtccgcgcttcccacggcgcgccattacgctattgcaaatgcaaatagttatcaataatattatcaatatatttctgcaatcaatgaaaaattgcacagtaaacatggggttatggtgtgacggcgttaaaagtaggaagtgagagctggtggcagtcgaaacatggcccggaatggcagcgtctgaatgacgaaatgtttgaggtcactttctggtggcgtgatccccaaggttctgaagaatacagcacgataaagcgcgtatgggtctacatcactggtgtgaccgatcaccatcagaacagccagccccagagcatgcagcgaattgcaggcactaacgtctggcagtggacgacacaactcaatgccaactggcgcggcagctactgctttattcccaccgaacgcgatgacattttttctgtaccatcccccgatcgcctcgaattgcgcgaaggctggcgaaaactattaccccaggcgatagccgatccgctgaacctacaaagctggaaaggcgggcgagggcacgctgtttctgcactcgaaatgccgcaagcgcctctgcaaccgggatgggattgtccgcaagcgccagaaatacctgccaaagaaattatctggaaaagtgaacggttgaaaaagagtcggcgtgtatggatttttaccaccggcgatgcaacagcagaagaacgcccgctggcagttttgctcgatggcgaattttgggcgcaaagtatgcccgtctggccagtgctgactagcctgacccatcgtcagcaacttcctcccgccgtgtatgtgttgatcgacgctatcgacaccacgcaccgcgcccacgaactgccgtgtaatgcggatttctggctcgcagtacagcaagagttattacccctggtgaaagctattgccccttttagcgatcgtgccgatcgcaccgtggttgccgggcagagttttggtgggctttccgcgctgtatgccggactgcactggcctgaacgctttggctgtgtattaagccagagtggaagctactggtggccgcatcggggcgggcagcaagagggcgtgttacttgaaaagctaaaagctggtgaagttagcgccgaaggtctgcgcattgtgctggaagcgggtattcgcgagccgatgatcatgcgggccaatcaggcgctgtatgcgcaattacaccccataaaagaatccattttctggcgtcaggttgacggcggacatgatgcgctttgttggcgcggtggcttgatgcaggggctaatcgacctctggcaaccacttttccatgacaggagttgaatatggcattcagtaatcccttcgatgatccgcagggagcgttttacatattgcgcaatgcgcaggggtaattcagtctgtggccgcaacaatgcgtcttaccggcaggctgggacattgtgtgtcagccgcagagtcaggcgtcctgccagcagtggctggaagcccactggcgtactctgacaccgacgaattttacccagttgcaggaggcacaatgagccagcatttacctttggtcgccgcacagcccggcatctggatggcagaaaaactgagtgaattaccctccgcctggagcgtggcgcattacgttgagttaaccggagaggttgatagcccattactggcccgcgcggtggttgccggactagcgcaagcagatacgctgcggatgcgttttacggaagataacggcgaagtctggcagtgggtcgatgatgcgctgacgttcgaactgccagaaattatcgacctacgaaccaacattgatccgcacggtactgcgcaggcattaatgcaggcggatttgcaacaagatctgcgcgtcgatagcggtaaaccactggtctttcatcagctgatacaggtggcggataaccgctggtactggtatcagcgttatcaccatttgctggtcgatggctttagtttcccggccattacccgccagatcgccaatatttactgcacatggctgcgtggcgaaccaacgcctgctagcccatttacgcctttcgctgatgtagtggaagagtaccagcaataccgcgaaagcgaagcctggcagcgtgatgcggcattctgggcagaacagcgtcgtcaactgccgccgcccgcgagtctttctccggcacctttaccggggcgcagcgccagcgcagatattctgcgcctgaaactggaatttaccgacggggaattccgccagctggctacgcaacttagtggtgtgcagcgtaccgatttagcccttgcgctggcagccttgtggctggggcgattgtgcaatcgtatggactacgccgccggatttatctttatgcgtcgactgggcagcgcggcgctgacggctaccggacccgtgctcaacgttttgccgttgggtattcacattgcggcgcaagaaacgctgccggaactggcaacccgactggcagcacaactgaaaaaaatgcgtcgtcatcaacgttacgatgccgaacaaattgtccgtgacagcgggcgagcggcaggtgatgaaccgctgtttggtccggtactcaatatcaaggtatttgattaccaactggatattcctgatgttcaggcgcaaacccataccctggcaaccggtccggttaatgaccttgaactggccctgttcccggatgtacacggtgatttgagtattgagatcctcgccaataaacagcgttacgatgagccaacgttaatccagcatgctgaacgcctgaaaatgctgattgcccagttcgccgcggatccggcgctgttgtgcggcgatgtcgatattatgctgccaggtgagtatgcgcagctggcgcagctcaacgccactcaggttgagattccagaaaccacgcttagcgcgctggtggcagaacaagcggcaaaaacaccggatgctccggcgctggcagatgcgcgttacctgttcagctatcgggaaatgcgcgagcaggtggtggcgctggcgaatctgctgcgtgagcgcggcgttaaaccaggggacagcgtggcggtggcactaccgcgcagcgtctttttgaccctggcactccatgcgatagttgaagctggagcggcctggctaccgctggataccggctatccggacgatcgcctgaaaatgatgctggaagatgcgcgtccgagcctgttaattaccaccgacgatcaactgccgcgctttagcgatgttcccaatttaacaagcctttgctataacgccccgcttacaccgcagggcagtgcgccgctgcaacttagtcaaccgcatcacacggcttatatcatctttacctctggctccaccggcaggccgaaaggggtaatggtcgggcagacggctatcgtcaaccgcctgctttggatgcaaaatcattatccgcttacaggcgaagatgtcgttgcccaaaaaacgccgtgcagttttgatgtcagcgtgtgggagtttttctggccgtttatcgcaggggcaaaactggtgatggctgaaccggaagcgcaccgcgacccgctcgctatgcagcaattctttgccgaatatggcgtaacgaccacgcactttgtgccgagcatgctggcggcatttgttgccagcctgacgccgcaaaccgctcgccagagttgcgcgacgttgaaacaggttttctgtagtggtgaggccttaccggctgatttatgccgcgaatggcaacagttaactggcgcgccgttgcataatctatatggcccgacggaagcggcggtagatgtcagctggtatccggcttttggcgaggaactggcacaggtgcgcggcagcagtgtgccgattggttatccggtatggaatacgggtctgcgtattcttgatgcgatgatgcatccggtgccgccgggtgtggcgggtgatctctatctcactggcattcaactggcgcagggctatctcggacgccccgatctgaccgccagccgctttattgccgatccttttgccccaggtgaacggatgtaccgtaccggagacgttgcccgctggctggataacggcgcggtggagtacctcgggcgcagtgatgatcagctaaaaattcgcgggcagcgtatcgaactgggcgaaatcgatcgcgtgatgcaggcgctgccggatgtcgaacaagccgttacccacgcctgtgtgattaaccaggcggctgccaccggtggtgatgcgcgtcaattggtgggctatctggtgagccaaagcggcctgccgttggataccagcgcattgcaggcgcagcttcgtgaaacattgccaccacatatggtaccggtggttctgctgcaacttccacagttaccacttagcgccaacggcaagctggatcgcaaagccttaccgttgcctgaactgaaggcacaagcgccagggcgtgcgccgaaagcgggcagtgaaacgattatcgccgcggcattcagcagcttgctggggtgtgacgtgcaggatgccgatgctgatttcttcgcgcttggcggtcatagcctactggcaatgaaactggcagcgcagttaagtcggcaggttgcccgccaggtgacgccggggcaagtgatggtcgcgagtactgtcgccaaactggcaacgattattgatgctgaagaagacagcacccggcgtatgggattcgaaaccattctgccgttgcgtgaaggtaatggcccgacgctgttttgtttccatcctgcgtccggttttgcctggcagttcagcgtgctcagccgttatctcgatccacaatggagcattatcggcattcagagtccgcgccccaatggccccatgcagacggcggcaaacctggatgaagtctgcgaagcgcatctggcaacgttacttgaacaacaaccgcatggcccttattacctgctggggtattcccttggcggtacgctggcgcagggtattgcggcgcgactgcgtgcccgtggcgaacaggtggcatttcttggcttgctggatacctggccgccagaaacgcaaaactggcaggaaaaagaagctaatggtctggacccggaagtgctggcggagattaaccgcgaacgcgaggccttcctggcagcacagcagggaagtactagtacggagttgtttaccaccattgaaggcaactacgctgatgctgtgcgcctgctgacgactgctcatagcgtaccgtttgacggtaaagcgacgctgtttgttgctgaacgcacacttcaggaaggtatgagtcccgaacgcgcctggagcccgtggatagcggagctggatatctatcgtcaggattgtgcgcatgtggatattatctctccagggacgtttgaaaaaattgggccgattattcgcgcaacgctaaacaggtaaattaatattatttataaacccataattacagaaaataattatgggttttttatttgtttgatttataggtttgatgaatatttctcttaaatagagtgaatgttgcattcagtggaaggaatttacaaacttcagcttcggataattatcaccaactggtaaagtgagcgccgtggagatttccccctattggactcattttcaggttataccccatgagtagtctgaatattaaacagggaagtgacgctcattttcccgattatcctctggcgagccccagtaataatgaaattgatttacttaatctaatcagtgttttatggcgggccaaaaaaacggtcatggcggtcgtttttgcgtttgcctgcgcaggcttgctgatctctttcatcctgccgcaaaaatggaccagcgcggcggttgtcacgcctccagaacctgttcagtggcaagagttggagaaaagtttcactaagcttcgtgtgctggatctggatatcaaaattgatcgtacagaagcatttaacctgtttatcaagaagtttcagagcgttagcttgctggaagagtacctgcgtagtagtccttatgtgatggaccaattaaaagaggcgaaaatcgacgaactggatttgcatcgcgcaattgtcgcattgagcgaaaaaatgaaagcggttgatgacaatgccagtaagaaaaaagatgaaccgagtctgtatacctcctggacgctaagttttaccgcgccaaccagtgaagaggcgcagaccgttttgagcgggtatatcgattatatctctacgttggtggtgaaagagagcctagaaaacgtccgtaataaactggagatcaaaacccagtttgaaaaagaaaaactggctcaggatcgcattaaaacgaaaaatcaacttgatgcaaacattcagcgcctcaattatagtctcgacattgccaacgcggcaggaattaaaaagcccgtttacagtaatggtcaggccgttaaagatgaccccgatttttctatttctctcggtgcagacggtattgaacgcaaactggaaatagaaaaagcggtcactgacgttgcggaactgaacggtgaattacgtaatcggcagtatcttgtcgagcaattaacaaaagcacatgtcaacgatgtgaattttacgccgtttaaatatcagttaagcccgagtttgccagtgaaaaaagacggtccgggtaaggcgattattgtgatcctttccgcgttgatcggcgggatggtggcttgtggtggcgtgctgttgcgctatgcgatggcatccagaaaacaggatgccatgatggcagaccacttagtttaactatttgcggtactaggtgccgttcgtccgagcggcaccacaagcggcgttccggcaactggatcgtcaatgatcatgcagcgcagaccataaatgcgctcaatcagttcagcagtgacaatctccttcggcgctccctgagcaacaattttcccttcccgcaatgcaatcaaatggctggcgtaacgacaggcctgattaagatcgtgcagcaccgccgccagggtatagcctttttcgcggttcagttcgcttaacaactccagcaaatcaatctgatgactgatatccagccaggtcgtgggttcgtcgagcagcataattgccgtttcctgggccagcaccatcgcgatccacgctcgctggcgttgtccgccagaaagggtatccacgctttgatctgccagatgagttattcccgtggcctgcattgctttcgttaccgcttcttcatcctctttgcgccagcgggtaaacagcggttgatgcggataacgtccacgcgccaccagctcctgcacggtgatatcgcccggcgtggtagcattttgcgccaacagaccaatccggcgtgcaacctctttactggcgtaatgttgaatgtgctcgccatccagccagacatgcccatgagcaggcgtcatcaggcggcttaaggtacgcagtaacgtggatttaccgcagccatttggcccgataattgccgtgaagtgaccatcaggtatttctacagtcagattttccgcaacggtatatttgccatatcccagggttaactgttcgccgcgcaaacgggctacactttcggtcattttttgcgagactcctgaattaacaagacgataaggtaaataccgccgaggctgacggtaacgacgccaaccggaagttgatacggcataaacagttgttgggcgcagagatcggccgccagcagtaacagcgccccgcatagcgccgcctgggttagcccccagcgagcggtgccgctaatgcgtcgggcaatgtgcggtgcgactaaagcaataaaggaaatcggcccggcaagcgctgttgccgcagcggtaagcaccactgcaaccagcatcattaacagacggctacgttcgacgctgacgcccagcgcacacgcggtatcatcgcccatttccagcaagcgcatccggcgtaccagtaaggcggcggcaatgagcatcaatataatgatgggtgcggaagggctggtttttgcccacgtcaggccgttgaggcttccggcattccacaaacctgctgttagcgccgtttctaaagacgctttcagcaacagccaggtattaaaggccaccagcatggcgcgaacgccgataccgataataatcaaccgaaaggtgtcgatgccgttgcgccaggcgagcagccagaccagcaggctagtgacaatgccgcccaccattgcactcagcgcgatagccgtcaggtcctgaccaaacagcaccatcgccaccagcacgccgctccacgccccggtgttaaagcccattacgtcagggctgccgagcgggttacgcatcaggctctgaaaaatcgcgccactgacgcccagtgctgcgccaatcaacagcgccatcagcacgcgtggtaaacgccattcggtgaccaccatcgtcatactgcgcggcgcatcgcccatcagcgcggcgaatacctggctggtttccagcgtgacggcaccgctgcgtaatccccagatacctgcaaccacacaggcggaaaccagcagcaaacaggtgatgagtaatcggcgagagacgtaaatcatgcaccacctcgcgttttacgtcgcacgaggaagatcagcaccggtgcaccaataaacgcactgaccacagaaacgcgcagttcgccgggcacaatcacccgcccgatgatatcggcaaacagcagcagggcaggggtagcaagtagcgtgacgggcaggctccagcgatgatcggcacccaccagccaacgcgccatatgcggcatcatcaggccaataaaggcaatcgggccaactattgccgtcgcactaccacaaagcacggtaatcgccagcagaccaatcaactgtgtgcgcgccacgcgactgcccagcgccgtcgcggtgtcgctgccgaggctcaaactgttcagcgcgcgactcagtaatagcgcagttgctccggcgatcagcaccgggatcagcaccacttttaaggtatgtagattgcgaatatccaggctaccggcttgccagaaacgcaactgatcgtagacgtcaggattaagcagggcgatgccgctggtcagtccttccagcaccgccgccagcgccacgcccgccagggttaaacgcaccggacttaactgcccgccgccctgactgccggtaaaggcaacaatcaaactggccaccagcgccccggcgaaggccatcgccagttgttcctgcgcggaagagtaaccaaacagcgccgcacccagcacaatggcaaagctggctccggcgttcacgccaagcaagccggggtcggcaagtgggtttcgggtgagggtttgcattaacgccccggcaaggccaagcgcgccgcctgccagtaaaccggcaagggtacgcggcagccgcgcgtcgagcacgatggtgcagtcggcgctctggcaggtgccggagaaggcctccagcactacggaagcggggagactttttgccccaatgagcaggcttaatgccgtcgcgataatcagtaataacagcaatccgggcacggcaatggcgcgtgtcacggcaacagaaccagacatacgaacttccatgataatgaaattaattatcgttatcgatcttatttggatatgttagcatgtgcagcctaagaataggtatttaaaatatttgatggcaaggcattgtaatgaataaacaatcctggctgcttaacctcagcctgttgaaaacgcacccggcgtttcgcgcagtattcctcgctcgtttcatcagtattgtgtctctgggtttgctcggcgtcgcggtgccggtgcagatccagatgatgacacattccacctggcaggtggggcttagcgtgacgctgaccggcggcgcgatgtttgttggcctgatggtcggcggtgtgctggcggatcgctatgagcgcaaaaaagtgattttgctggcgcgcggcacctgtggcattggcttcattggactgtgccttaatgcactgctgccggagccgagtttgctggcaatctatttacttggtttatgggatggttttttcgcaagccttggcgttacggcgctattggcggcgacaccagcactggtagggcgtgaaaacttaatgcaggccggggcgatcaccatgttgaccgtgcgtctggggagcgtgattagccccatgattggcggtttattgctggcgaccggtggcgtagcctggaactacgggctggcggcggcgggcacgtttattaccttgctaccgttgttaagccttccggcgttgccaccgccaccgcagccgcgtgagcatccgttgaaaagtttactggcaggatttcgttttctgcttgccagcccgctggtgggcgggattgcgctgctgggtggtttattgacgatggcgagcgcggtgcgggtactgtatccggcgctggctgacaactggcagatgagtgcggcacagattggttttctctacgcggcgatcccgctcggcgcggctattggtgcgttaaccagcgggaagctggcacatagtgcgcgaccagggttattgatgctgctctccacgctgggaagcttcctcgccattggtctgtttggcctgatgccgatgtggattttaggcgtggtttgtctggcgctgttcggctggttgagtgcggtcagcagcttgctgcaatacacaatgctgcaaacgcaaaccccggaagcgatgttagggcggattaacggtttgtggacggcgcagaacgtgacgggcgatgccataggcgcggcgctgctgggtggtttgggcgcgatgatgacaccggttgcttccgcaagcgcgagcggttttggtttgttgattatcggcgtgttgttattgctggtgctggtggagttgcgacattttcgccagacgccgccgcaggtgacagcgtccgacagttaatgcttaaaacagcgccttaagcctatccagcacttgcatggcgctgtagtaatccagacggaacgtctcggttcccagcgcataaacctgcttgttttgtactgcaggcaggtgcgcgagcagcggattagcataaatagcatcggcatctttctgatcaccggcgaacaggaatagactctcgccatttaaccctgcagccagattttccccaccaagctgaatgatgtcatggcgtttaccctgactttggctggcatttaaccctgcgggtaacttcgccagcgtaaagccgagttgttccagcatctgcccttgtgcactttctggcgtccagagattggcactgtgtgcagcggcagtatagacaatggcagtgaccggctgcggcggtaatttgatttgctctttcgccgccgccagttgcttatcaaactgcgcaatccgctctgccgcttgtttctcatgcccggtaatttcgccaagttgcgttaacaggctctgccagcttttgtcgtcgtaattgatgattaatgtcggggcgatggtggaaagctgatcatacagtgccagcgcgctatccccgccggttgcgctaattaaaatcagatccggcatttgcgcggcaacggcttcggcgctcggttcgccgatatagagccgttgcagtttgcgttctttcgccaccttgctccactggcgtaaaaagccctggtcatccgcgacgcggttattcggcgtggtcgcgccgctggcgatcaccggagcatcaatcgccagcagactgccggtcagggtgacgctggtggaaacaatacgctgcggctggctttccagtgtatgtgtgccacggctgtcagtaatctgacgcggccagtcagcggcctgaactgcggctattccactaagcaaaagtcctgttaatagaagggcgttgcggtagagcggggcgagtctcacaaatcagcttcctgttattaataaggttaagggcgtaatgacaaattcgacaaagcgcacaatccgtcccctcgcccctttggggagagggttagggtgaggggaacagccagcactggtgcgaacattaaccctcaccccagccctcaccctggaagggagagggggcagaacggcgcaggacatcacattgcgcttatgcgaatccatcaataatgcttctcattttcattgtaaccacaaccagatgcaaccccgagttgcagattgcgttacctcaagagttgacatagtgcgcgtttgcttttaggttagcgaccgaaaatataaatgataatcattattaaagcctttatcattttgtggaggatgatatggatacgagtctggctgaggaagtacagcagaccatggcaacacttgcgcccaatcgctttttctttatgagcccgtaccgcagttttacgacgagtggatgtttcgcccgcttcgatgaaccggctgtgaacggggatagccccgacagtcccttccagcaaaaactcgccgcgctgtttgccgatgccaaagcgcagggcatcaaaaatccggtgatggtcggggcgattcccttcgatccacgtcagcctagcagcctgtatattcctgaatcctggcagagcttctcccgtcaggaaaaacaagcttccgcacgccgtttcacccgcagccagagcctgaatgtggtggaacgccaggcaattccggagcaaaccacgtttgaacagatggttgcccgcgccgccgcacttaccgccacgccgcaggtcgacaaagtggtgttgagtcggttgattgatatcaccactgacgccgccattgatagtggcgtattgctggaacggttgattgcgcaaaacccggttagttacaacttccatgttccgctggctgatggtggcgtcctgctgggggccagcccggaactgctgctacgtaaagacggcgagcgttttagctccattccgttagccggttccgcgcgtcgtcagccggatgaagtgctcgatcgcgaagcaggtaatcgtctgctggcgagtgaaaaagatcgccatgaacatgaactggtgactcaggcgatgaaagaggtactgcgcgaacgcagtagtgagttacacgttccttcttctccacagctgatcaccacgccgacgctgtggcatctcgcaactccctttgaaggtaaagcgaatagccaagaaaacgcactgactctggcctgtctgctgcatccgacccccgcgctgagcggtttcccgcatcaggccgcgacccaggttattgctgaactggaaccgttcgaccgcgaactgtttggcggcattgtgggttggtgtgacagcgaaggtaacggcgaatgggtggtgaccatccgctgcgcgaagctgcgggaaaatcaggtgcgtctgtttgccggagcggggattgtgcctgcgagcagtccgttgggtgagtggcgcgaaacaggcgtcaaactttctaccatgttgaacgtttttggattgcattaaggagcgaggatgagcattccattcacccgctggccggaagagtttgcccgtcgctatcgggaaaaaggctactggcaggatttgccgctgaccgacattctgacgcgacatgctgcgagtgacagcatcgcggttatcgacggcgagcgacagttgagttatcgggagctgaatcaggcggcggataacctcgcgtgtagtttacgccgtcagggcattaaacctggtgaaaccgcgctggtacaactgggtaacgtcgctgaattgtatattacctttttcgcgctgctgaaactgggcgttgcgccggtgctggcgttgttcagccatcagcgtagtgaactgaacgcctatgccagccagattgaacccgcattgctgattgccgatcgccaacatgcgctgtttagcggggatgatttcctcaatactttcgtcacagaacattcctccattcgcgtggtgcaactgctcaacgacagcggtgagcataacttgcaggatgcgattaaccatccggctgaggattttactgccacgccaagtcctgctgatgaagtggcctatttccagctttccggtggcaccaccggcacaccgaaactgatcccgcgcactcataacgactactactacagcgtgcgtcgtagcgtcgagatttgtcagttcacacaacagacacgctacctgtgcgcgatcccggcggctcataactacgccatgagtagcccaggaagcctgggcgtctttcttgccggaggaacggttgttctggcggccgatcccagcgccacgctctgtttcccattgattgaaaaacatcaggttaacgttaccgcgctggtgccacccgcagtcagcctgtggttgcaggcgctgatcgaaggcgaaagccgggcgcagcttgccagcctgaaactgttacaggtcggcggcgcacgtctttctgccacccttgcggcgcgtattcccgctgagattggctgtcagttgcagcaggtgtttggcatggcggaagggctggtgaactacacccgacttgatgatagcgcggagaaaattatccatacccagggttacccaatgtgtccggatgacgaagtatgggttgccgatgccgaaggaaatccactgccgcaaggggaagtcggacgcctgatgacgcgcgggccgtacaccttccgcggctattacaaaagtccacagcacaatgccagcgcctttgatgccaacggtttttactgttccggcgatctgatctctattgatccagagggttacatcaccgtgcaggggcgcgagaaagatcagattaaccgtggcggcgagaagatcgctgccgaagagatcgaaaacctgctgctgcgccacccggcggtgatctacgccgcactggtgagcatggaagatgagctgatgggcgaaaaaagctgcgcttatctggtggtaaaagagccgctgcgcgcggtgcaggtgcgtcgtttcctgcgtgaacagggtattgccgaatttaaattaccggatcgcgtggagtgtgtggatagtcttccgctgacggcggtcgggaaagtcgataaaaaacaattacgtcagtggctggcgagtcgcgcaagtgcctgaaggagagaacacgatggctattccaaaattacaggcttacgcactgccggagtctcacgatattccgcagaataaagttgactgggcctttgaaccgcaacgtgccgcgttgttaatccatgatatgcaggactattttgtcagcttctggggcgagaactgcccgatgatggagcaggtgatcgcgaatattgctgcgctgcgcgactactgcaaacagcacaatatcccggtttattacaccgcccagccgaaagagcagagcgatgaagatcgggcgctgttgaatgatatgtgggggccgggcctgacccgcagcccggaacagcaaaaggtggtggatcgcctgacgccagatgccgacgacacggtgctggtgaagtggcgctacagcgcgtttcatcgttctccgctggagcaaatgctgaaagagagtggacgtaaccagctgattattaccggggtatatgcccacattggctgtatgaccaccgcaaccgacgcatttatgcgcgatattaaaccgtttatggtggcggatgcgctggccgatttcagccgtgacgagcatttgatgagcctgaaatatgtggccggacgttctggccgggtggtgatgactgaagaattactgccagcacctatccccgccagcaaagcggcgctgcgtgaggtgatcctgccgttgctggacgagtccgatgaaccgttcgatgacgacaacctgatcgactacggtctggatagcgtgcgcatgatggcgctggcggcgcgctggcgcaaagtgcatggtgatatcgactttgtcatgctggcgaaaaacccgaccatcgacgcctggtggaagctactctcccgcgaggtgaaataatggatttcagcggtaaaaatgtctgggtaaccggcgcaggtaaaggtatcggctacgccacggcgctggcgtttgttgaggcgggagcgaaagttacaggttttgatcaagcgttcactcaggagcaatatccctttgcgaccgaagtgatggatgttgccgacgctgcgcaggtcgcgcaagtgtgtcagcgactgttagctgaaacggagcgactggacgcgctggtcaatgcggcgggaattttacgcatgggcgcgaccgatcagctcagtaaagaggactggcagcagacttttgcggttaacgtcggcggtgcgtttaacctgttccagcaaaccatgaaccagtttcgccgtcagcggggcggggcgattgtcactgtggcgtccgacgccgcgcacacgccgcgtattggcatgagtgcttatggcgcaagcaaagcggcgctgaaaagcctggcgttgagcgtcgggctggaactggcgggtagcggcgtgcgctgtaatgtggttagccctggctccaccgacaccgatatgcaacgcacgctgtgggtgagcgatgacgccgaagaacagcgtattcgcggctttggcgagcagtttaaactcggcattccgctggggaaaatcgcccgtccacaagagatcgccaacacgattttgttcctcgcctctgacctcgccagccatattaccctacaggatattgtggtcgatggcggcagtacgctgggggcataagcatgatctggaaacgccatttaacgctcgacgaactgaacgccaccagcgataacacaatggtggcgcatctgggaattgtgtatacccgtctgggcgatgatgtgctggaagccgaaatgccggttgatacccgtactcatcagccgttcggtttactacatggcggcgcgagcgcggcgctggcggaaacgctgggaagcatggccggatttatgatgacccgcgacggacagtgtgtggtaggcacagaacttaatgcaacacaccatcgcccggtgtctgagggaaaggtacgcggcgtctgccagccgctgcatcttggtcggcaaaatcagagctgggaaatcgtcgttttcgatgaacaggggcggcgttgctgcacttgtcggctgggtacggcagttttgggatgaacccgacagaattagatgagattgcaggaaaactcggttaacggagtgatcgagttaacattgttaagttaaatattggtttcaactccgatttacatggttgctgtgttgttaaattgtacaaagatgttatagaaacaaaatgtaacatctctatggacacgcacacggataacaactatgaacaaaagtgggaaatacctcgtctggacagtgctctctgtaatgggagcatttgctctgggatacattgctttaaatcgtggggaacagatcaacgcgctgtggattgtggtggcgagcgtctgtatctatctgatcgcttaccgtttttatgggctgtatatcgccaaaaatgtgctggcggttgacccgacgcgtatgacgccagcggtgcgccataacgacgggctggactatgtgccgacggacaagaaagtgctgttcggtcaccattttgcggccattgccggagcaggtccgctggtggggccggtactggcggcgcaaatgggctacctgccggggatgatctggctgctcgctggggtggttctcgccggtgcggtgcaggatttcatggtgctgtttgtttctacgcgccgtgacggtcgcagcctgggtgagctggtcaaagaagagatggggccaaccgccggggtgattgcgctggtggcctgctttatgatcatggtcattatccttgcagtgctggcgatgatcgtggtgaaagccctgactcatagcccgtggggaacatataccgttgcgttcaccattccgctggcgctgtttatggggatctacctgcgctatctgcgtccggggcgtattggcgaagtgagcgtcatcggtctggtattcctgattttcgccattatctctggcggctgggtggcagaaagtccgacctgggcaccgtactttgactttaccggcgtgcagttgacctggatgctggtgggttacggttttgtggcggcggtgctgccggtgtggttactgctggccccgcgtgactacctctctaccttcctgaaaatcgggactatcgtcggtctggcggtaggcattttgattatgcgcccgacgctgaccatgcctgcgctgaccaaatttgtcgatggcactggcccggtatggaccggtaacctgttcccgttcctgtttatcaccatcgcctgtggcgcggtgtctggcttccatgcgctgatctcttctgggaccacgccgaagatgctggcgaacgaagggcaggcgtgctttatcggctacggtgggatgttaatggaatccttcgtggcgattatggcgctggtttccgcctgtatcatcgatccgggcgtgtattttgccatgaacagcccgatggcggtgctggctccggcagggacggcggatgtggtcgcttctgccgcgcaggtggtgagtagctggggctttagcattacaccagatacgctaaaccagattgccagcgaagtgggtgaacagagcatcatttcccgtgcgggcggtgcgccgacgctggcggtggggatggcctacattctgcacggcgcgctgggcggcatgatggatgtggcgttctggtatcacttcgccattttgtttgaagcactgtttattctgacggcggtggatgcaggtacgcgtgctgcgcgctttatgttgcaggatctgctgggcgtggtgtctcctggcctgaagcggaccgatagtctgcctgctaacctgctggcaacagcgctgtgcgtactggcgtggggctacttcctccatcagggcgtggtcgatccgctgggcggcattaacactctgtggccgctgtttggtattgccaaccagatgctggcagggatggcgctgatgctctgtgccgtggtgttgttcaagatgaaacgtcaacgttacgcctgggtggcgctggtaccaacggcctggctgctgatttgtaccctgaccgcaggctggcagaaagcgtttagcccggatgcgaaagtcggcttcctggccattgctaataagttccaggcaatgatcgacagcggcaatattccgagccagtatactgagagtcagctggcgcaactggtgttcaacaaccgtctggatgccgggttaaccatcttctttatggtggtcgtggtggttctggcactgttcagcattaagacggcacttgcggcattgaaagatccgaagccaacggcgaaagaaacgccgtatgaaccaatgccggaaaatgtcgaggagatcgtggcgcaggcaaaaggcgcacactaaagtcagagtgagggggggatgttggcgaatgttggcttagtgcccagggttccctctcaccctaaccctctccccggtggggcgaggggactgaccgagcgcgttgatagcatttgtaggccggataaggcgttcacgccgcatccggcactctttcagcaacatggttagcggaggccaagatgtttgatagtctggcaaaagccggaaaatatttaggtcaggcggcgaagctgatgattggtatgcctgattacgacaactatgtcgaacatatgcgggttaaccatcccgatcaaacgccgatgacctacgaagagtttttccgtgagcggcaggacgcgcgctacggtggaaaaggcggcgcgcgctgctgctaaatttgtacgtcaggctttaaagctttccacttttttgaacgctgcacgcaacgtatctggtgtcagcgtgactggcaggtaatgaatggactccaccggacgcagggtgtgggcaatcactttgtcgatctccgcctgattattgatatccacttccagctccgccagtgtagtcggcagatgaaaacgctgatacgctccagttaattgcgccagcacatcatcctgacccagcaaggcgctttgcaccagaattccgtaggcgactttggtgccgtggagaaacttctcggtttgcggcagcacggtcagaccgttatgcacggcatgagctgccgccacacgcgtaaaacgatcgcccagaccaccaaccatcccaccaccagcaataatagcatccaccacatcgcaaaaactttgcgttaactgttgattttgctgatcgctcagcgcctgttcgctactgtttaacaagacgtcgcgaatggcttgcgcattattgatccccagtcgcacggttagcggcaacgtttctggttgcggagccagcaccaccgcttcataccatttcgccagcgtgtcaccgatccccgccagcagatattgttgcggtgcattgaggataatctccggttccaccagcaccataaaattggcgtcgtcgaaaatctcataatgcagcgcctgtccggcatcattataccagacggagagcggtgtccaggcggcgcaggtggcggcgatcgtcggaacggcaacaaacggcagaccgagacggcgggcgagggctttcgcggtgtcgagcagtgcaccgccaccgacgccaatcaccacgctgcggtcgtcaccggactcagccgccagttgttgtacatcgctttcgctgcaatgaccgcgaaacaaaatatgctttgcccctggcagtccaaacgctggcggaagtttggtttgcgccgcagcaatggcgcgtttgccgtagatccacaccgcgcgagaaagttgttcatcagtgaaaaaatcgtgcaggtgattgaaacttcctggatgactaaagtagttagccgggccgacgaccacgcggataggattgtgaggcatgttgtgttgtccttattgttttatttagacatctaaacgtcttgattgccaaatactagcatcgtgttatagtgccttcaacacgcaacttcgtcaggtacaataaaaatgacaaataaccctctgattccacaaagcaaacttccacaacttggcaccactattttcacccagatgagcgcgctggcgcagcaacaccaggcgattaacctgagccaaggctttcctgattttgatggtccgcgctatttacaggagcggctggcgcaccacgttgcacagggggcaaaccaatacgcgcccatgaccggcgtgcaggccttgcgcgaggcgattgctcagaaaacggaacgtttgtatggctatcaaccagatgccgatagcgatatcaccgtaacggcaggggcgacggaagcgttatacgcggcgattaccgcactggtgcgcaatggcgatgaagtgatttgttttgatcccagctatgacagttacgcccccgccatcgcgctttctgggggaatagtgaagcgtatggcactgcaaccaccgcattttcgcgttgactggcaggaatttgccgcattattaagcgagcgcaccagactggtgatcctcaacactccgcataaccccagtgcaactgtctggcagcaggctgatttcgccgctttgtggcaggcgatcgccgggcacgagatttttgtcattagcgatgaagtctacgagcacatcaactttagtcaacagggccatgccagtgtgctggcgcatccgcagctgcgtgagcgggcagtggcggtttctagttttggcaagacctatcatatgaccggctggaaagtgggttattgtgttgcgccagcgcccatcagcgccgaaattcgcaaggtacatcagtatctgacctttagcgtgaataccccggcacagctggcgcttgctgatatgctacgtgcagaacctgagcattatcttgcgttaccggacttttatcgccagaagcgcgatattctggtgaatgctttaaatgaaagccggctggagattttaccgtgtgaaggtacatactttttgctggtggattacagcgcggtttctaccctggatgatgttgagttttgccagtggctgacgcaggagcacggcgtagcggcgattccgctgagcgtgttttgcgccgatcccttcccacataaactgattcgtctctgttttgccaagaaggaaagcacgttgctggcagcagctgaacgcctgcgccagctttaattatttaaccgtccaggcgcgggaatattgacggtcggcaaacaactcttgcaggccgttaatttgcttcaggcgcagcacttcgtcgctgtccattcccagctctttgccaattttattatcgtcccatcccaactggctaagttcacggacgatttcgctcatggcggtgatttgatggcgtccacgagcgcgattatgacgaatagtcgcggcgatgcgttgattacgcgtaccttccagacaggtcaccggcaaataaccttttaagcgtaattttaaactactactgcctttaccaatttcatggcggtgaaaaccatccacgatttccatggcatttttatccgtatgtgtgaccacaatgggttgggtaaaaccatctatttcaatggatttttgcagcagttttttttcgggtggtgccacgttgtttgggttgtaatcattaggcataagttggctgtttttaacccacagaacgcaatccactggctcttcacgaaaggggctaacctgatggatcgccatgcggatttcattaatcgctttgatgcgatcatcttccggcaagctggcgagaaattgcgttaaatcctgcgttaatcgttgttgcatagtatcccccattcctgacgttttccttttatccgttcgttataacgctgatagttcttgctttttgtggggctaaaacttaatgcccgacaccagtaatcgttattgagtaaaactttgcatatccgccgccaggaggggatatctttcgcgccaatgtccccttgctgggtttgtggaacctcgatgccttttttctgataccagtgcaaataaatggcgattttattgcggtaatgctcagctgttttttccggcatgctattgagcagcaataatgcatattcttgccagtctaaatgttctggcttgaggattttccgatgcccatagaaatgattgtcatgtccggcgtaaatgccgccactttttaccccgctgactcgtgcgcacatagcagcccagcgatccggttcgataacgtgatagagccataatccttgtcgttgctccgggccaaaaggttcgcaaattcgcatatgacgcagaggaacgcctgcctgatacattaggttatacagtgggttgcagagactttgatgatttgcataccaggtccagatatcagccactttccagtcgtaaatggggtaaatgtaccagctatgaccgcctggtgcggccgtagtccagggtttatcgtcggcaaaacgttgtttatttaaactggcgatggcgacaaaacggttgtaggactcatccgcacggatgccgatcatcatcgccgccggacgtttttgactaaaccattcggcaaactcacgtacaaattgttcgaaggtcatgcctggctggtaaaagcagaaaaagtcagggtcggttatcgcatcttggggaggttgacgtacccattcgacatcaggttcccagcactgccattcgggttggtattgactaagggaattttgcgtcgtaagcgggagcgcaacccagtaaaactcttcgatgacatcggtgtacaactcgcgcagggactgaacatagttaatggtgcaagagaattgcgcctcccagtcgataaacaaaacgcagatttttttgcccatttgtcgggcaagttcggctgtcagatgcagcattaaaccagagtctttgccgccagaaaaactgacacaaacgcggggtagggtgttgagtgtccaggtaatacgctctcgtgcagcttccagaatattgagcggaagaggaattttataaatagacatctgaagacgctctctgaacgttacagggtgatcagtgagataagtctgttaattataaagtaaacactgtaaagcagagtgttttatttttcattcgcgctgtgaataaatagatgaaagttatagtagctgtctgtagttatatatcaaaaactctcatttagacggtcaataaatcgggagaacaccaaattatttaaagaagatttattataggaaatgtaaagctttatactaggtaacggatgttctagttttatctcttttaagttaagaaagtcacggtaggaattataaagttcataggggactattcccagtaaatctgtaactgcaatgctattaatgattgtcagcaaagaggaaccacgaaaactgattttgcgattcataaatctctcgtctatttccatttgaatatcatcaacccctgcacttttagatattaattgggtgaactcttctgccataatttgttcataagtgctattgtcagtaattcgtggatgcctattactacaaattagagtattgcgaatcgtatgcaatggcatgcaaatgacggaacggctgatcactggcatttgggtgatcaccagatcggctttgcggtgaaccaacagttcttcagcattctctgcactcatgaggatatcatggcactcaatctcgacagaggaatcttgccgtaggcagcggatcagcatactattattagagcaagaaatgagctgagggccgtagataataaagtttttctttagttcggacttattgactatattaattgtttgttcaaggcctctgagatttttctcaagatggtgatgcagatttaaccctgttgtcgtcggcgcgataccttttccactgcgaatgaataaagggtcattaaattgcgcacgtaagcgttgtaagctctggctcacggcacttggggtgatatatagactttcagcagctttgctaatgcttaaatgctggtaaatacactcaaatatgacaagaagatttaagtcgaactttttcaagtcgtagagattggccatacactactccggttatatttttcttccatgatatattcacttaatcaatgttttttgcgtatatatttttattgattatgtttttttgcttaactcaggattaagtttttctaaaatagcacagccacttagggcagagcgagcaattcatgcttttttaggatggttgaaaagcagggatatagttcaaccatccatgaattaccttttatttattccccataatgatattaagcgttttctgatcgggcaaccccacggcctgttgtagcgtattttccttactcatgtaatagatagccggcgtgacatttgcccccagatcgtccatcagtttctcattgtcacttaacactttcatttgctctgtacttacgtttgcaggcacgtttagcttaagcttgccaccagaggcttcatattgttgccaggtttttgcgggatctttggaggcaagaattgccgctgctgtcgccgggctttctggcttgataaccccaaccaacaatgttcttaattgcactttgccagaatctacccacgggcgcgcctgctgccagaactgtttacaatatgggcagaacggatcggcgaagacgtagacaatgaccggcgcatcttttttaccgtcgaggagccagtgggattgttccatccgttgccacatttcgcgtccggctggtgcgtaaatttctttttcgataagtgtgttactcaggttttcacctttctcgttgtacatgtaaccagagatagcgtgcttaccatctggagtcaggtagatggtgacgcccatatcctgatactttccgagataacctttcattcctccgggggcatcgaatgttttgatgattgtaatgccctgtttttcaatcgcttttactggagcaggaagttcctctgcgaaggcgattgcaggaagcagagccagtaaaagtatcttttttaacattaatttgtccttttcagtcagtgcaaaagtcgagtaaaaggcataacctatcactgtcataggtaagagcttagatcaggtgattgccctttgtttatgagggtgttgtaatccatgtcgttgttgcatttgtaagggcaacacctcagcctgcaggcaggcactgaagataccaaagggtagttcagattacacggtcacctggaaagggggccattttactttttatcgccgctggcggtgcaaagttcacaaagttgtcttacgaaggttgtaaggtaaaacttatcgatttgataatggaaacgcattagccgaatcggcaaaaattggttaccttacatctcatcgaaaacacggaggaagtatagatgtccttgattaacaccaaaattaaaccttttaaaaaccaggcattcaaaaacggcgaattcatcgaaatcaccgaaaaagataccgaaggccgctggagcgtcttcttcttctacccggctgactttactttcgtatgcccgaccgaactgggtgacgttgctgaccactacgaagaactgcagaaactgggcgtagacgtatacgcagtatctaccgatactcacttcacccacaaagcatggcacagcagctctgaaaccatcgctaaaatcaaatatgcgatgatcggcgacccgactggcgccctgacccgtaacttcgacaacatgcgtgaagatgaaggtctggctgaccgtgcgaccttcgttgttgacccgcagggtatcatccaggcaatcgaagttaccgctgaaggcattggccgtgacgcgtctgacctgctgcgtaaaatcaaagcagcacagtacgtagcttctcacccaggtgaagtttgcccggctaaatggaaagaaggtgaagcaactctggctccgtctctggacctggttggtaaaatctaaatttccttcgtctttcacgccatagcggcgttggcgtcgcccgctcaccccggtcacttacttgtgtaagctcccggggattcacaggctagccgccttgctctgacgcgaaatacttcggaaattcacctaattcttcgggtgctgcggcacccgattttcttccccgcaccatgatgcaagctgcatccaggtagccgcagaggccgcttgcatgatgatgtttaaagcccaggagataaacatgctcgacacaaatatgaaaactcaactcaaggcttaccttgagaaattgaccaagcctgttgagttaattgccacgctggatgacagcgctaaaagcgcagaaatcaaggaactgttggctgaaatcgcagaactgagtgacaaagtcacctttaaagaagataacagcttgccggtgcgtaagccgtctttcctgatcaccaacccaggttccaaccaggggccacgttttgcaggctccccgctgggccacgagttcaccagcctggtactggcgttgctgtggaccggtggtcatccgagcaaagaagcgcagtctctgctggagcagattcgccatattgacggtgattttgaattcgaaacctattacagcctctcttgccacaactgcccggacgtggtgcaggcgctgaacctgatgagcgtactgaacccgcgcatcaagcacactgcaattgacggcggcaccttccagaacgaaatcaccgatcgcaacgtgatgggcgttccggcagtgttcgtaaacgggaaagagtttggtcagggccgcatgacgttgactgaaatcgttgccaaaattgatactggcgcggaaaaacgtgcggcagaagagctgaacaagcgtgatgcttatgacgtattaatcgtcggttccggcccggcgggtgcagcggcagcaatttactccgcacgtaaaggcatccgtaccggtctgatgggcgaacgttttggtggtcagatcctcgataccgttgatatcgaaaactacatttctgtaccgaagactgaagggcagaagctggcaggcgcactgaaagttcacgttgatgaatacgacgttgatgtgatcgacagccagagcgccagcaaactgatcccagcagcagttgaaggtggtctgcatcagattgaaacagcttctggcgcggtactgaaagcacgcagcattatcgtggcgaccggtgcaaaatggcgcaacatgaacgttccgggcgaagatcagtatcgcaccaaaggcgtgacctactgcccgcactgcgacggcccgctgtttaaaggtaaacgcgtagcggttatcggcggcggtaactccggcgtggaagcggcaattgacctggcgggtatcgttgagcacgtaacgctgctggaatttgcgccagaaatgaaagccgaccaggttctgcaggacaaactgcgcagcctgaaaaacgtcgacattattctgaatgcgcaaaccacggaagtgaaaggcgacggcagcaaagtcgttggtctggaatatcgagatcgtgtcagcggcgatattcacaacatcgaactggccggtattttcgtccagattggtctgctgccgaacaccaactggctcgaaggcgcagtcgaacgtaaccgcatgggcgagattatcattgatgcgaaatgcgaaaccaacgtgaaaggcgtgttcgcagcgggtgactgtacgacggttccgtacaagcagatcatcatcgccactggcgaaggtgccaaagcctctctgagtgcttttgactacctgattcgcaccaaaactgcataagaagaagtaagattcacctgcaattgcttagccgccggggtcaaacctggcggcttttttatggcattaaaaagccccgccgggatggctccgggcagggcgggatacttattctggcaattaacgcacaaccagcaccggcagattggcgtggcggatcacgctgctggcgttagaacctaacagatgggtgctaatgcttgggttgcgagaaccaataactacaacatcagcccccagttcttctgccaactcattgacttcatcccgcacgctaccaaaacggacatgttgtttaatgcgggaaggatcgatggtgaagtggctgaccatcgtttgcagacgttcttgtgcttcatgttgcagatgctcttcaaaacgacgcacatcagcggcaaaacggtgcaggctcaggctggcactcccgggtagtacgtgaagtagatgaataactccgtcatcctgggcgaggaattcagcgtggcgaacagctttgtcgctcaattccatttcaaatacatcaactggcataatgattgtcttatacataaccctttctccctgttaatcatgaacaaatcattcgccatgattataatatttatccctgatatttgtctggttctttttccttacgaactgtttctgtgatgaatatattctcactgaacaccaggaattctcccaaaacctgtggtaccgcccgttttcccgctgtgatagctacccttaaagactgactcttttttgaactgtctctggaggttgcatgaaagcattgacttatcacggcccacatcacgttcaggtagaaaatgttcccgatccgggcgttgaacaggcagatgatattattctgcgtattacggcaacggcgatctgtggctctgacctccatctttatcgaggcaaaatacctcaggttaaacatggcgatatttttggtcatgaatttatgggggaagtagttgaaaccggaaaggacgtaaaaaatttgcaaaaaggcgaccgagtggtaattccgttcgtcattgcttgtggcgactgttttttctgtcgattgcaacaatatgccgcctgcgaaaataccaatgcgggtaaaggcgctgcgctcaataaaaaacagataccagctccagcggcattgtttggttatagtcacctgtatggcggcgttcctggtgggcaggcggaatatgtccgcgtccctaaagggaatgtggggccgtttaaagtaccgcctttgcttagtgatgataaagcgcttttcctttctgatattctgccaacggcatggcaggcagcaaaaaatgcgcagatccaacaaggtagtagcgttgcagtctatggtgctggtcctgtgggattgttgacaatcgcctgtgcacggttgctcggtgcggaacagatttttgttgttgatcatcatccctaccgcttgcatttcgccgccgaccgctacggcgcgatcccgattaattttgatgaagacagcgatccggcacagagtattattgaacaaacggcaggtcaccggggcgtggatgcagtaatagacgccgtcggttttgaagcgaaaggcagcaccacggaaacggtgctgactaacctgaaactggagggcagcagcggtaaagcgttgcgtcagtgtattgcggcggtcaggcgtggcggcattgttagcgtaccgggcgtctacgctggatttattcacggtttcctgtttggcgacgcctttgataaagggttgagctttaaaatgggacagacccacgttcacgcatggctgggagaattattaccgttaattgagaaaggattactgaaaccagaagaaattgttacccactatatgccgtttgaagaggccgcccggggatatgagattttcgaaaaacgtgaagaggagtgccgtaaggtgattctggtacccggtgcacaaagcgcagaggcggcgcagaaggcggttagtggtctggtgaatgcgatgccggggggaacaatatgatcgtcaggagtggttttcgaggtaaaggacagccatgacgataatcgccgccataatcagaaatcctatcaggatgtaaaatgcttctgccatggttattcccacaaacgaaacggaataattttgcagcaaaagtgaacagtgagaaccaggaaaaattgctgattttgcgtaaagaggatgcgagtgcatcctctgggcaaagcgagttatcgcttgtgcagatgggattaaagcaggtagtcgccagcagcttctggctggtattcgagttccagcacttcaaggtgggttgcaacgccgcccggaagttcccagtgaatggaatcgccaacgcgcagccccagcagtgcggcacctaccggagccataacggaaagctgagtattgctatcggtcatttttgccggatacaccagcgtgcgcacacgcacttcgccatcgctaagattgcggaatttaacccggctgttcattgtcaccacgtcgtgtggcatctcttctgggctacacatttgggcgcgatccaactctgcgtttaacgcgtcggcgattggcaaaccagcataggcgggttgctccagcagaatatcgatgcgttcggcatccaggtcgttaatgatgatagttggtctggacatttttactccatgtcgtcggtgctgcgagtgtcgcagataaacatacccaaaagaaaaccctcaccgtcaggcggcgagggtttaactcacatgatgatactgactgttgctcactctttgaagtgatttgcgtcacattcagggaattcctcaatgcagcgcattatgtataaatcttaatcgccttggtttatggaagacgaattagcgtgttttgtaaatcagatgattaataacccgctttatcaatcacaaaggttttgccacagttacctgggtgaggttgtggcaagaaactgtttgcagaaagcggagcgttgatggcgtcagctttgatgctgatctgaatttcagtcaaatacgcagggttaccctggcacgttagcttaactgctttcacgttctcttttccccagcttttggcaaaggcggcgtcaaagtcacggcggctcactgttttaccgtaattatccgcaaggaattttccggcttcgctctctttaatttcttgattcaggcgtaccatcgtaccgaagtatgcgtccggatcaaaaccaaagcaggcaccgtgtttggcatattcgtagcgttccaggcaggaacgtccgccagctcctggcatgacttcacttagtttagcggccgtttccagacttaatccggtttccgggctactacacattcggctggcgcgcgcttctggtagattcgggattgggcgagtagcgcaaccgaagcgcatccagcggcgttcatcaacaccacgggcagcaacgcttttaggcaatcctggccacagaccatgtacggtcagaaaatcagctttgttggtcgtttcggtttgcaggcgacattcatctcgttcgttacgatttcgatcgtgttgactctggcaaaatccggtttgccaggagagggccaggacatagcgatcaaaatcgccatactgttttgcctgcaacgctaaggcgttggcagaagagaagggaagcagagaaaccgcgagcaacgcggcgttacgccagaatgctttcataatgggtgtggaactcatacatacactgaatactatctattaaatcataaaaaagcccgccaggtgggcttacctggcgggcgtgatgatttattcagcgtttggcgaacgtattagttccacatggcgagaatcggccagccaaccaacagcaacatagagatgtaaatcaccccgaagattgcgccaagacgccagtaatctttacttttcacatagccacagccgtaaataatcaccccaggaccggttgcatacggcgtcagacagcccatgataccgatagacagcaccagcaggatacacagttgttccattggtacgcccggaatacctttaccgacggccagaataaccggcagcatggttgcggtgtgcgcagacaggctggcaaacaggtagtgtgcaaagtagaacaccagaaccagtacaatcaccgttgcgtttggactgaatccttccaggtgcgtactcatggtaccggcgaaccagtcaataaaaccagaacgagtcaggccgttagccatcacaaccagagttgccaggttgaccagtgtgttccatgcgctgttatagcgggtaatgtctttccaaggcacaacgtgcagggccagcattaggctaactgccagcagaccaaccgcagtagcattaatgacttcactgccaaatacccacaaacctaagctgagcaatacaaggccaatcagtgtccactctctgcgtgtcagcgcacccatggttttcagttcatcacccgcccaggttgccacttcttcactgtgtgtgatttccggtttgtacagcacgtaggaaagccacggcgcaatgataagcaagataaccccaaccggcaggaagcagaggaaccactgcaaccagctaatctggataccggcaattttgctgacgaactccagacccagcacgtttggtgccgcaccggtgacaaacatggagctactcagactggtactaatgaccatcatccacatcaaatagccgccaatacgacgcgcggacggatcgttcgggaaacttttaaacaacggcggcaggtttttaatgaccggaaaaaccgtacccccggtacgcgcggtgttggaaggtgtaaacggtgccagcagaatgtcgataatgacaatcgcataacccaacgtcagcgtgcgtttgcccatgaatttcaccaggaaaagggcaatgcgacgacctaacccggaaacttcataccctaatgcaaaaataaatgcgccaaataccagccataccgtggtgctggaaaaaccagccaggccccatttcagcgcctgtttttgcgcattaaacgctgggtcagctaattctttggcatcaaagagcaggtaattactgccaataacgcaaatagtaaccgcaataaaactgatcgctgttgccggaattggctcgaggatcatgccgacaatcattgccacaaacacagcgaagtaatgccatgcctgcggcggcataccgtcggggacagggataagaaacatgacacccatcaccaccagtggggccaatagtttccatatattatcttttgctaaagacatacgggttctccgaaaattaatatttccaaatttatcaagtgcttaaataattaaatctgtgctaaaaaccaggtaaggatcagtaggtcagcactgccgcctggactgagatttcgttcgatacactccctgtcgaactgccggagataatcgagatcggcgggggttcgaatgccccctttttgcaataatgtttgcgcctcgcgctgtagccagcgcaggcccccctcgccaccgcggcttgcaacgttggtatcgccgttgatcgccatcagtaggagcaaggtatcgagcaatgccagttcaggatctaacccctgatccagcagagtgaggtaatgcggcaaggcgtgattgatcaccagtggataacccgcttcggcttcaccgcgtgcgccggtaaggccaagctgttggtacaaccgttgacctgccgtcagttgactattattggtacgcagttcgcgatcggtcaggccacggcagaaacttgccgccgtagaacaaacggttgttggcgttaccggttggttgagttgaagcaaacggccaattgccgcacatagcagccctaaagaaaaaatgctgcctttatgcgtgtttacgcccgcagtggcgcggaacatatcaccttcgcaagccataccaattgggcgtaatccgtggagtaccgcttctggtgccatttccgcactacaggcaccaaattcaatgaaacggggtagccagccctgaatcgccagcgcgctgcggtggaaatcttccagcgccatatctttgtgcgcaccgcagttaatgcgatccacgaggcctggtttcggactcagattgacttcagtcagcatggcgcgccagcccagcagggcgtactcatcgattaaactcgtcgcaagctttgtggttttagtactcgttgcaggcatgctcatcgttcagcagtgcctccatgttatttagttgacgttgcaggcatcgacatcgttcagcagtgcctccatgcggttgagtaaatcggtcagttgatgggtttttccacgcgcgcagacggctgcgctttgttcgcacaacaggcagcggcgaggcggcagactatagtcgcggcgggagagaatttcgccttcgggcgtcaggacatcgatatcccataaccgcccgagaggatgactatgttcaagctcaatggtggcgagcttgaggtcgcgagccggggcggcaatgctcaacatgccctccggcccgctggcggaaaccagtgcagcctgctcctgaatttgccagccctgttttgcggctaaggcacgcaaggctgtcacgccatgattaaaaattcggcgtgtgacctcgctgtctttaatcggcccaggcgcaaccacggtaaaggagaccagtggaacaggatggcgcttgagccagacgtgttgccgtgcttgcctttcatcccggctgacgagcagctcgggaatacttaccgcatggtggctggcgagttcaggaagcaggtgcatggcttattccttcacctgatgcacaacatcgatcacgctgccatcgcggtaacgcacaacggcaacgacgcggtctgtgaattcaatcggctgtggttcaccggtcagcagacgcgcacgttcgcgcagccactcaatggaaaccactttaatgcccgcttcctgcagacgttctgccagttccggacgtgccgggttaactgcgataccgtggtctgtgaccagaatatcgacactggagcctggggtgatgcaggtcagtacgttatccaccagagtcggaatacgaccgcgtaccagcggcgcgacgatgatggaaagcgcagaggcaatcgcggtatcgcagtgaccaccggaagcaccacgcagtacgccgtcagagccggtcagcacgttaacgttgaactgggtgtcaatttccagcgcgctcagtaccaccacgtcgagacgatcaacgcttgcgcctttgctaccccagttagcgtactggttggcgctgatttcgatgtgattggggttacgggccaggctttgcgcagcatggctgtcaaagctctgcacatccagcagtttgcggatcagacctttttcgtgcaggtcaaccatcgtcgcggtaataccgccaagggcgaagtcggcgcgaatatcgcggctacgcattttgtcttccaggaaacgggttaccgccaggcttgcgccgccggtgccggtttgcatggagaaaccttctttgaagtagccagagttgacaatcacatccgcagcgctacgggcaataagcagttcgcgcgggttagtggtcatacgggtcgcgccagcgccgatttttgcagcatcgccaacgcggtcaactttgacgatcaaatcaacctgatcttgctcaatgcttgccggattatgcggataaggcagcagttcttcggtaagcatcacgacctgttttgcgttgtcggcatcaactattgcatagccgagggagccgcagcaggctttaccggtgtagccgttggcattaccgaattcatcacaggacgggacgccgaggaaagccacgtcgatattcagttcgccgctctgtaccagatgcacacgaccgccgtgagagtggatctgcaccggttctgccagcagaccacgggagatctcttccgccagtggaccacgcaggccggaggtataaatgcgggtaaccacgccctggcgaatgtgttctaccagcggcgcatggcaatcactcagggagctggacgccagggtcaggtttttaaagcccatcttcgcgatgacgtccatcaccatattgacggtcaggtcaccgccacggaaagcgtgatggaaggaaaccgtcatgccgtcctgtaaaccagagcgacgaatcgcttcttccaggttggcgcacagtttgcgatcgcgcgctttttcagcctggtaggtttgctttgggctgttctggaaagcggcaagatcgcattcagcgcgacgattccaggccgctacccgttcttgtcgttgagattgttcaattttctgcgtcattttgattgccttattcttcgcggatgccggaaagttctgcacgggagagcaccagacgggcgcgatcgataaccggaccgtccaccatcttgccgttcagggaaaccacgccgaggccttcgcgagcggcggcttcagcggcttctacgacgcggcgggcgtgatccacttctttctgggtcggtgcgtagaggttgtgcagcagatcaatctgacgcgggttgatcaggcttttgccgtcaaagcccagctgtttgatgtgggcggcttcttgcagaaatccggcttcgttgttagcgtcggaatagacggtatcgaacgcctgaatacccgcagagcgcgcggcctgcaaaatggaacagcgtgcgaacagcagttcagttccttccggggagcgttctgtacgcaggttgcgcacatagtcttctgcaccgagggcgataccgatcaaacgctcggaagcgtgagcgatttccactgcgcgggtaatccccagcggagattcaatcgccgccagcaggccggtgctgccgggttcacgaccacaggctttttcgatacgcaggatctctttttcaatatccagaacatcctgagcggtatcggttttcggcagacgcacaacgtccgcaccaccgcgaacgacggcttccaggtcgttaacaccccattcggaatccagcgcgttgacacgcacaatggtttcaatatcgcgatacagcggatgttgcagcgcgtggtaaaccatgcggcgggcggtgtctttttcacgcaatgctacggagtcttcgaggtcaaacatcagggcatcagccgggtagatgaaggagttgctgaccatcgcggcattggcaccaggcacaaacaacatgctgcggcgggtgcgagttttacgttgttgcaggctagcggaaatcattggcaatcctcccatggcagagccgggataccgctggcgcgtgccagcagggcttccagtcgtgcacgtaaaatgcagtacagtgcgcctttgtcatcgacattcagctgtacgccgcgcacgttgtagcgggcgagaacgtccagaatggtggtgcgaattgcatcgccaaactgtttctcaacgctgctattgatttgcaggtcgatatcctgcgtatcgagtggggcgatgcgtatcatcacatccccagactcaagggtgcctgcaacggcgggctggtttattttcatttttcacctgtttctcatgcgggggtcttttgacgagctgccgcgtcctggcgggagtgctcaagcaggttctgcaaataatgcagcgtgactgcagggaccagcggcgcgatagccgtgagatcgtttttcgccagcagttgacgtacccgggaagcggatatcggcatctcctggtaacgcagccgctcaatttcaaccagttcgatgggcggtgcggagatagtcggcgtttccagccagtagcgcatatcctggttgtactgggcggtaacgcgacaaaagggttcagtaccgacaaagcggtgagttacacccagcgcgggagcgaggtactgacggaaaatcttcagatcaatttcggtgtaacaatggttaatgacgctctgttctttaatgaagtagcaagggaacgtagcgcgggagatgatgtattcggagccacgatgcacagtcaggcgtggaatatcggcggtgccttttaacaccaaatccagccggtcttcataggggaagcgactagaatcttctttgactaaaaacagatgcaaccagtcgcactgtgccgcagcctgttgaatcagataacggtgaccattcgtaaagggattggcgttcatcacaatgcagccaatcttgttccctggatgacgaaattttttcaggctttcggcatagcgtttcagtcgcgtggcgctgttttccatcagcaccatcacgccgggtacgctggtcagcgtggaaaaaccgcactggcggaacagcgcctcgtattcggttttggtataaataaacagatgcgtgctgtgccgctcataggcgaggtttatcaattcagtggctaatgtcagcgccagtccttcaccgcggacggattcactgatagcaacgcatttaataatatttccggcaattccaccgcacgcgataagcttttcatcgcgggttacggtaataaatacttcgactgtggtgtcaacgctcaaatcattttcatgcaggaattgggcgatttccgccatttttttattttcactacgttttacgcgggtgaaaatatcattgccgaacataataaatagtatcctgaaggtgcatgttgttatcgatttgcaacgaatgttgttcaatgttgcaaactgataaccttttattttcacttgggagaaagggggtgatcgaggtatatctttttctcctttcgctatacatcctaaggagtatttcggcgtgaaattttgatttatttcacatagagttagtggttttttatttatttaatgattttaagttttttaattaatgtaattacgaaatgactcgcaggtttaagtgatttaattgatttaatgaataaaatttgccacgatcataattaatatctatgtattttgattcaacattttaattacatccgtcaaagaggctcgggacaacccgcaaggaaaacaatgttgcagcttaacgagaataaacagtttgcatttttccaaagactggcatttccgctgcgtatctttttgctgattctggtgttcagtatatttgtcattgcagccctggcgcaatattttacggccagttttgaggactatttaacgcttcatgtacgcgacatggcaatgaatcaggcgaaaattattgcctccaatgacagtgtcatctctgcggtgaaaacgcgtgactacaaacggctggcgaccatcgctaacaaattacaaagagataccgattttgattatgtggtgattggggaccggcacagcatccgcctttaccatcctaatccggagaaaattggttatcctatgcagttcaccaaacagggcgcgctggagaaaggggagagctacttcattaccgggaaagggagtatggggatggcgatgcgcgccaaaacgccaatctttgatgacgatggaaaagtcatcggcgtggtgagcattggctacctggtgagtaaaatcgatagctggcgggctgagtttttattaccgatggcaggtgtgtttgtcgtgctgttagggattctgatgttgctgagctggttcctggccgcgcatatccgtcggcagatgatgggcatggagccaaagcaaatcgcacgcgtggtccgtcagcaagaggcgctgtttagtagcgtttatgaagggctgattgcggtggatccgcatggttacattaccgccatcaatcgtaacgcaagaaagatgctggggctgagttcccccggacggcaatggttgggtaaacccattgttgaagtggtcaggcccgccgatttctttaccgaacagattgatgaaaaacgtcaggatgtggtggcgaactttaacggtctgagcgttattgccaaccgggaagctattcgtagtggtgatgatttgctgggggccattatcagctttcgtagtaaagacgaaatttccaccctcaatgcgcaactgacgcaaataaaacaatacgttgagagccttcgtacattgcgacacgagcatctcaattggatgagcacgctcaatggtctgttgcagatgaaagagtatgatcgcgtgctggcgatggtgcagggggagtctcaggcccagcaacagcttattgacagcctgcgcgaggcgtttgccgatcgccaggtggcggggctgctttttggtaaagtgcagcgcgcccgggaactggggctaaaaatgatcattgtccccggtagccagcttagccaactgccgccaggactggatagcaccgagtttgcagccattgtgggcaatttacttgataacgccttcgaagccagcctgcgtagcgatgaaggaaacaagatcgttgaattattcctcagcgatgaaggcgatgatgtggtgattgaagtcgccgatcagggctgcggcgttccagagtctctacgagacaaaatatttgagcagggggtcagtacgcgtgctgacgagcccggtgaacatggcattgggttgtacttgattgccagctacgtaacgcgctgcggtggtgttatcactctcgaagataatgatccctgcggtaccttatttagtatctatattccgaaagtgaaacctaatgacagctccattaaccctattgatcgttgaggacgaaacgccgctggcagagatgcatgcggaatatattcgtcacattcccggattcagtcagatattactggcgggaaatctggcgcaggcccgaatgatgatcgagcgttttaagccggggctaatcttgctcgataactatcttcctgacggtagagggattaatttactgcatgaactggtgcaggcgcattatcccggcgacgtggtgtttaccactgcagccagcgatatggaaacggtgtctgaagccgtacgttgtggtgtatttgattatctcattaagcccattgcctatgaacggctggggcaaacgctaacccgtttccgccagcgtaaacatatgctggaaagtattgatagcgccagccagaagcaaattgatgagatgtttaatgcttatgctcgcggtgaacctaaggacgagctaccgaccggcattgaccccttgacgctaaacgcggtgcgaaaactgtttaaagagcctggtgtgcaacatacggcagaaacggtggcgcaggcactgaccatcagccgcaccactgccaggcgttatcttgaatattgcgccagccgccatctgattattgctgaaattgttcacggcaaagttggcagaccacaacgcatataccacagtgggtgacatgataaagccggaggaaacttgcctccggcattactatttacttgcctgtgaccgctgctgccgttcctggcaccatcagctctgtagcaacgataacaatcaccaaaccaacaagcaccggtacgctggtgcgttttacgacttcaaacgggctgatcttcgccatcccggcaaccgcaacgactacgccagaaacggggctaagggtacggccaaggttactcgcctgcagcatcgggatagtcaaatacgccgggttaatgccggaagagtgcgccagtttcgggatcatctcaacaaacgcataaaacggcgcattgccactaccggtcgtgactgccgccagcattgtcagaatcaccaataccagcatcaggatgatactcgcgctaccaaagctggtagcgatagaaatcagactttgaataaagccgatggtgctaagcccctgagcgaataccccagcggcaaccagcagcatcaccacgttagcaaacgcatctgccatcccgcgataagccacttccagaccagagaaaactttctgggtattaaagctgcggaggaactccagaatggaggcaatcagcatacaaatcaccagaatagtgatgatgtgtaattgcggaccccatttaccgtcaaaaatcagtacaccgatgatcggcgtgaacggcaaaatggcataaaacgcaggagcagtggtggtgatttcactgacatctaacatttcatgagagatgtgctcttttttatccagataacgttgccagaagaagtgggcgatcgccatgccgataattgcagcaatactgataggcagcgtcgttttgaaggcgaagtcaatcaggctcatttcggaagcttgcgccgccagcaccacatccccactagtcggtgcgagaataatcgccgccggggaggcacaaatggcagcagctgcgccacgactgataccaacgtttaccatcaccggaaatagggttgccatcagcaaaacacccagaccggttgcggaagagacggccagagacatcagacaggcgacaaaataggcggcaatcatcagcaggtaaggggagttaatatactgcaatggtttactcgccagcttgaccaccatatcattcgcgccgatatgggtcatgtaagcggcaaatccacacagcatcataatcatcatgccgaggtcgccgccgcggctcattagtaatattttaacgtattcaacgatatccgtggcgctgtagcctgtactagcctggctggacggtaacactttgtgccccataatggcactgataatcagcaataacaggccaccgacaaataacacaccagtggcggaataccctttaatgatgtagcgagctacacccacaataaccacaaccccaataaggagctcaatgaatgtcagcataatttttcctgtctccaggccccaaagtaaataataaaaaattcctaaagcttaaggaaaaaatatgcccaataaattggcgatgaatgctgattaaaatcaagaaaaactgccattaagacattgaagttgctgtttttatacatagataacaaaacgcatatttagcggttggcaattatcacataataatgtgtgcaaattgatggtggattgatgcaaatttgttaattgcaatggtgttagctgcggctgtgcgctcaaaaaataatctaatatgagcataggttgacgatatatattatatacttcgttaagatgattgttgtatctcgttaaaaaataaaataatttttccttgattgcattttgtcatcaaaaaagacttggtttttcttttttgactattcccatcgcagaaaacgacgcatcatctttaatcgatgcgcggaaatatttaacttgaacaagcggaaataaatagagcagctattcagattattctttatgttgggtctattaaggttatgttaattgtagctttgctatgctagtagtagatttttgataaatgttttatggtcacaaatgaacgtgagtaaatatgtcgctatcttttcctttgtttttattcagttaatcagcgttggtaaagtttttgctaacgcagatgagtggatgacaacgtttagagaaaatattgcacaaacctggcaacagcctgaacattatgatttatatattcctgccatcacctggcatgcacgtttcgcttacgacaaagaaaaaaccgatcgctataacgagcgaccgtggggtggcggttttggcctgagccgttgggatgaaaaaggaaactggcatggcctgtatgccatggcatttaaggacagctggaacaaatgggaaccgattgccggatacggatgggaaagtacctggcgaccgctggcggatgaaaattttcatttaggtctgggattcaccgctggcgtaacggcacgcgataactggaattacatccctctcccggttctactgccattggcctccgtgggttatggcccagtgacttttcagatgacctacattccgggtacctacaacaatggcaatgtgtactttgcctggatgcgctttcagttttgagacaaatgaagttttagtaacttctttaaaatcaatagctaaaataagtaacatcaaaaataacgcgacttttatcactttttagtaaagttacactggacaaagcgtaccacaattggtgtactggtaaccgacacagcatttgtgtctatttttcatgtaaaggtaattttgatgtctaagattaaaggtaacgttaagtggtttaatgagtccaaaggattcggtttcattactccggaagacggcagcaaagacgtgttcgtacacttctctgcaatccagactaatggttttaaaactcttgctgaaggtcagcgcgtagagttcgaaatcactaacggtgccaaaggcccttctgctgcaaacgtaatcgctctgtaagatacgtcagcaagaattcaaaacccgcttaatcagcgggttttttttggtctttagtgtgcggtactggcgctaaacagccagaatgccagtgcggtcatggcaaaagaccccagaaggttgacgaaaacgttcagtaatgcccagccaaagcggccctcttgtaacaaaaacaccacttctgcgctaaatgtactgaaggttgttagaccgccacaaaatccggtggtgattaatactttccacactggatcaatgttcgtcatcctgctgaaccatgcgaatcctattcctatgatgaatgccccaatcaggtttgctgtcagcgtccccaacggaatcgcctgatgcagtgggttaaatcgcatacttaacagccatctcgccacgcttcccgtaccaccgccaataaaaactgctaaaagaagttgtaacactgcaaaatcctgctatttgatttgtatgagtgataagtgtaacgccgaataatcgtcgttggcgaattttacgactctgacaggaggtggcaatgctggttgccgcaggacagtttgctgttacatctgtgtgggaaaagaacgctgagatttgtgccagcttgatggcgcaggcggcggaaaacgacgcaagcctgtttgccctgccggaagcattgctggcgcgcgatgatcatgatgcagatctaagcgttaaaagtgcacagctgctggaaggcgaattcctcggactttacggcgagaaagtaaacgtaacatgatgacgacaattctgacgattcatgttcctagtacgccggggcgcgcatggaatatgctggtggcacttcaggcaggaaacatcgtcgcccgttatgccaaactgcatctctatgatgcatttgccattcaggaaagtcgccgtgttgatgctggtaatgaaatcgctccgttactggaggtggaagggatgaaggtcggtctgatgacctgttatgacttacgctttccagagctggcgctggcacaggcattacagggagctgaaatcctggtacttcctgccgcctgggttcgcgggccgctcaaagagcatcactggagtacgttgcttgccgctcgtgcgctggataccacctgttatatggtggcggcgggggagtgcgggaacaaaaatatcggtcaaagccggattatagatccctttggcgtcaccattgcggcagcgagtgaaatgcctgcactcattatggcggaagtgacgcccgaacgtgtgcgtcaggtgcgcgcgcaactgcccgtcttaaacaaccgtcgctttgcgccgccgcaattattatgatgtttttttactcggcgcttgattcaccttgttacagattgctattgtgtgcgcgcgtcgaatgaccgttaatattctctggtttttaaggcgcgttctgttgccggttatatgtcaagaaggtatctatgggtgagattagtattaccaaactgctggtagttgcggcgctggtcgttctgctgtttgggactaagaagttacgtacgctgggcggagaccttggagcggccattaaagggttcaagaaggcgatgaatgatgacgatgctgcggcgaaaaaaggcgcagacgttgatcttcaggctgaaaagctctctcataaagagtgacgtggcgagcaggacgctccctcaatatcttgttcgatacaaaaaacccgcttcaaaaagcgggttttttatcagacagatgtaagtaattattacaggattacttaacttccatccctttcgcctgcaaatcggcgtggtaagaagagcggacaaacggaccgcatgcagcatgggtaaagcccatcgccagcgcttcggctttcatttcgtcgaactcatccgggctaacgtaacgttgaaccggcaggtgatggcggcttggctgcaaatattgccccagcgttaacatcgtcacaccatgacggcgcaggtcgcgcattacctcaataatttcttcattggtttcacccagtcccaccatcagaccagacttggtcgggatttccggatgcgcttctttaaagcgttccagcagcttcaggctccagttgtaatctgcaccaggccgtacctgacggtaaatacgcggtacgttttccaggttatggttgaacacatctggtggcgttgcagtcagaatatccagagcacgatccatacgaccgcggaaatccggcaccagagtttcaattttgatttgcgggcttttttcccgaatggcagtaatgcaatccgcaaagtgctgggcaccgccatcgcgcaggtcatcacggtcaacggaggtgataaccacataacgcagcgccatatcggcaatggtctgcgccagtttcactggttcattggcatcaggagctaccgggcgaccgtgggcaacatcacagaacggacaacggcgggtacaaatagcgccgaggatcataaacgttgctgtgccgtggttgaagcattccgccaggttagggcaggaggcttcctcgcagacagaatgcaggccatttttgcgcattgcggctttgatgccctggatacgtgtagagtccgctggaagcttgattttcatccattccggcttgcgcagcagggcttcgcgctctgttgccacgtttttaaccgggataagggccatcttatcggcatcgcggtatttaacaccgcgttccatcacaatgggtttactcatagcgtgcgtgttccagttgcgaattacgaaggaaagcgtttcaattcaatagattgttgtaattatcaactatttttgaattaacgactggcagtatatcattgaaacggacctgaaagcagccaaagcggtcgcgaaaatgtaaaattgttgttggattgtgccattttatcgttctgcgctgtgatctggctgtaacaatactttttcaaaatgcattacggataacatctattactccgtgcaggatgggatcacgcaggctgaatttgttgtagtggatagagaaatctatttgctcctcatttaaggacggaaaaggcagtttttccagcggccagcagcggctaaacaggttataaaaacggctgggaataatcgctaacatgtcactgttggcaaccagtgcagcgattgtcaaaatgttgtagctggtgaaattgatttgccggtccggaaacatttcttgaactctctgccgcagaccgctgaaattttgctcttccggtaacagaagtacatgcgcagcgttgtcgatagtctctctgtcatcttctaaagagagtagtggatttccctcgcggcaaattaacaccatattgtcggtgaacagaacatgatgttgcaccgtacgattggtgcaaaacatgttatcgatgatgagatcggtttgaaactgactgagttggttttccgcgtcgctgatgggcgggttgcgcagtaaaagctgcggatagtgagttttaatcgcccgatagatgacaggaaggaccagtgctccgacgctgggagtggtcgcaatagttatcgttcgttgcttatcatagcttccttcgatatccagcgcgccaagaatggactcaaggccctgactgatatactcatgtagatgcatcgcaaatgcggtaggagtgacaccctggcctttgcgaataaacaatgggtcagggaatataacgcgcagtttctgaatagactgactgattgcgctgggggtcagattaagcactttcgctgcattaacgatccctttatgtacatatacagcttcaaaaatagtcagaaggttaagatcaatatttcgtaaggttgtaaatatttgtggtttaccttcactgctctttctgcttaaacagggttcaatttgattattactatccacgcacttactccaattttattcatggaaaaataatatttaaaaaattacaataatcttatgtctaattggaacggaacgcttttgctcaccataatcaactatttcaataggttaatcaatggggtgagttacggagcaaggcgtggcaccgcatttctgcaagtgataaagaaaatatacaaacgcgaaggagatgtaaagcattagcagatattatgagtaatgacccagtgtaaattgggccattgatgtatggaattaagcggtaatatattcgaagtccggattgtttagtagcgctaaaatattttccagtaaacgtggagcaatattattagtcgtcgcttcgggtttccattgacttattttagccatttccattccggcatacccacaaggattaatacgtaaaaatggactaagatccatattgacgtttaatgccagaccgtggaaactacaaccgcgtcgaatacgtaaacccagactgcaaattttcttttccccaacatagacacctggcgcgtcagcccgaggatgcgcttctatacccagttcagccagggtattcaccactgtttgctcaagcaaggtcaccagttcacgcacaccgagtttacggcgtttcaggttaagcaacacatacatcacctgttgccccggcccgtgataagtcacctgcccaccgcgatcgctctggatcaccggaatatcacccggcattaaaatgtgctccgcttttcctgcctgaccttgggtgaataccggatagtgctcgaccagccagatttcatcaagggtactatcatcgcgggtatcggtgaattcatgcatagcctgggagattggctcgtaaggctgaagaccgagctggcggacaagaattttatcctgatacaaaacggcatctccgtggagaatgagtaaaagtgggggaaaagtatatcacagcgaggagaggggagttacccgaccaggagccgggtaacggagaagcgagttacagaaccatgcggacaatatcgattttgcccagttcttcatacagtgtttcaacctgctcgatatgagtggcgttgatagtgatagatacgctgtggtagttgcctttgctgcttggttttaccgttggggtgtagtcacctggcgcatggcgctgtaccacttcaaccacctgatcaaccagctcaggtaacgcctgccccataactttgtaagtaaaaggagtagggaattcaagcagttcgttaagtttggttttcatgtcagctccggcgtaacgtaattaaatagcaactcccgccagaaggcgggagttttttactgatgcttagtatatggggacggaaattacactttcaagtgtttaatttttaaccaaaccagtgatggaacattaatttaatgtaatcaatgattttgccgaagaagttaccttccgggatttcttgcaacacaaccagcgggcgttgctcgatcgttttgccatcaagctggaagttgatagttccgacgacctgattcttttgcagcggcgcatgcaattcactgctgttcagcacatagctggctttcagatctttcatgcgaccacgcggaatggtcaggtacacgtctttatcaacccctaagctagcgcgatcagaatcaccaaaccaaaccggttcagaggcgaactctttacctactttcagtgggttaacggtttcaaagaaacggaagccccaggttagcagttttttactttcggcttcacggcctttaaaagtacgtccgcccattaccgcagaaatcaagcgcatctggccttcagtcgcagaagcaacaaggttgtaacctgctttgtcagtgtgtccggttttgatgccgtcgacattcaggctgttatcccataacaggccgttacggttcagctggcgaataccgttaaacgtaaattctttttctttatagatgctgtattcattcggtacgtcacggatcaatgcctggccgatcagcgccatatctcgcgcggagctgtactgaccatcagcatccagaccatgtaccgtctggaagtgggtatttttcaggcccagtgcgttaacgtagctgttcatcaagccaacaaaagcgtcctggctaccagcggcaaaatcggccatggcgacacaagcatcgttaccgctttgcaggttaataccgcggatcagctgagaaaccggaacctgcatgcccggtttgaggaacatcaggctagaacctttaaacaccgggttaccggtggcccatgcgtcgttgccgatagtgactaaatcagtttctttaaatttaccggctttcattgcctggccgataacgtaactggtcatcattttggtcaggctggcaggatcgcggcggacatctgcgttctgttcggcgagcactttgccggagttatagtcaatcaggatgtaggactccgcatcgatctgcggtacacccgggatcatagttttgatattcaggtcatcggcatgtgcagcagagataaaggctgtgcaaagagccgtggtgagcgccaggcgcttcatgatacgagcggaaaaaatggtattcatggtctgaactacgacatccgtgatggaattaaaaaagtgccctactatagcaaatgcactaccggcaggcatctgactttccgcgtgactttgttaacgtcatttacagaaattgacacatcagatgcctgctttacgttactgcgcggtagtaataaaactctgtaattgggcttcggtttgcaaacgttgctgcaaggtactggcttcggctttgctggcgaatgggccaagctggatccgccagaccgcgccattttgagttacgcgaccggggacgccgaacttctgtcccagttgctgttggtactgttgcgcacgagcctgatcgcttacggccccgacttgcaccataaagttgccgctggcgctttggctgacggcttgcggtgtcaccattgcagggctggttgcaggcgttgtgctcggagctgtaacaacgggctgtggcgcaggcgtcggttcgctgccttccagtacaccaggcgctaaggtcgttggtgcgccgaggaaaccgctactggttaccggcgcgccggtcggatcttcgctttttagcgtgctattactgaccggaagaatgtcaccctgcgggccagacacactacttgttcccgcgccaccgcttaaatcgggaggtgcaggcagggcgtaagtctgtttggcgactgtggtacaagccataccaggaccagaaaggctaccatcctgggcaacaataatcggatcgatacgaactttggtgttgttactcgtgttaagacggtcagctgccgcgcgagaaagactaataacgcggtcgttgccgtaagggccgcgatcattaatgcgcaccacgatcattcgcccgttagccaggttagtgattctggcgtagctggggatcggaagcgttggatgggctgccgtcagctgtgtcggatcgaatgcttcgccagaggccgtcaggttactgccgggttcggcatcatagattgccgccagtcccgcctggctaaatcgagacggatcctgcacgattttgtagcttttaccgtcgcgctggtaatcctgatttgccgtcgcgttcagtggttcgaaacgcgggtccgccccgctaatttcaactatagggccgttacataccgcaggctgcggtacacttaccgtctgttgctgaccatcatcgcttgtacatgccgcgagcattcctgccgcgatgcagatcccgagccactgcttacgcattgcgcacctcttacacgcttttgctcaacattttcctgtgggtgtggatactcattacaatcccgaacccagccatcagcacaattagcgcgcttcctccataactgaccagtgggagcggaacccctacaaccggcagaataccgcttaccataccaatatttacgaagacataaacgaataatatcagcattaagccgccagccatgacgcgaccaaaggtggtttgcgctctggcggctatccacagcccgcgcatgatcagcagaatgtagagagcgagcagaatcagaatgcccactaatcccagctcttccgccagtaccgcgaagataaagtcagtatggcgttcggggagaaattcaagctgactctgagtgccgtgcagccagcctttgccgcgtaatccgccggagccaatagcaattttagactgaataatgtgatagcccgcgccgagtgggtcactttccgggtccaggagcatcattacgcgctggcgctggtaatcatgcatcaggaagaaccacagaatcggaatgaacgccgctaccagcactactgcgacgccaatcagacgccagctaaggccagagaggaacagtacaaacagaccggaaagcgcaacgaggatacttgttcccaggtcaggctgtgcagccaccagcagcgtgggcataaatatcagcaccagcgcgatgccagtgttcttcaagcttggcgggcaaacgtcgcggttgataaagcgcgcaaccatcagtggtacggctattttggcaatttcgctcggctgaaaacgaacaataccgaggtccagccagcgttgagcacctttagagatggcaccgaaagcatctaccgccaccagcaaaataatacagatgatatagagatagggggcccagccttcataaacgcgtggaggaatttgcgccatcaccaccatgatgaccagacccatcgcgatttggccgattttacgctccatcatgccaatatcctgaccgctggcgctccagataaccagggcgctgtaaaccagcaatgccagtaagatcagcagcattgtgggatcgagatggactttatcccagaatgtttttttattcggattatccgtcatgattaatggtcctccgctgcggcaaccgctggattttccgcaggcagatcggtgttgttatcacccagcataatgtggtcgaggatctggcgcatcagtgtaccaaccgccggacccgcaccaccgttctccagaatcatggcgacagccacttgcggattgttgtatggcgcaaaggcggtcatcagtttgtggtcacgtaaacgctcggcaattttgtgcgcattataggtttcgttcgctttcagaccgaagacctgagcggtaccggatttcgccgcaattttgtacggtgcgctagcaaagtatttatgcgccgtaccgttagggcggttagcaacaccgtacataccgtctttcgccagctcccagtaaccggaatgaatatcgccgacgggcggttcatgcggctgtacccatggcacctgtttgccgtcttcggcggtgctcatcagcaaatgaggaaccttcacgataccgtcattaatcaggatcatcagtgccttactcatctggattggggtcgctgtccagtaaccctgaccgataccaaccggaatggtgtcaccctgataccacggttttttaaagcgtttctgtttccattcgcgggtaggcatgttgccggaacgttcttccgccaggtcgataccggtgtaatgaccataaccgaatttacccatccattcggagaggcgatcgatccccatatcgtaggccacctgatagaagaaggtatccgcagattcttccaggcttcttgtgacattcagacgcccgtggccccattttttccagtcacgataacgtttttcgctacctggcagttgccaccagcctgggtcaaacagcgtcgtattgcgcgtgatcaccccggcgctcaatgcgctaaccgccacatagggtttaactgtagacgcgggaggataaaccccctgtgtggcgcggttcaccagcggtgtattcggatcgttcaacaaggcggaataatctttgctggagataccgtcaacaaacaagtttgggtcataactaggcgtggaaaccagcgccagcaccccacctgtacgcggatcggtgactaccacagctgcgcggctacccgccagcagcgtttcaatatattgctggagtttgagatccagcgtcaggtaaatatcgtgtccggcttgcggtggtacttcttttaactggcgaataacacgcccacggttgttaacttcaacctcttcataaccggtctgaccgtgcagcacatcttcatagtaacgctcaatgcccagcttaccgatatcatgcgttgccgcatagttggccagtttgccgtcattattcaggcgttcgacgtctttatcgttgattttgctcacatagccgatgacgtgggtcaacgcgctaccgtaaggatagtaacgacgtttatagcctttaacttcgacacccggaaaacggtactgattgacggcaaagcgagctacttgtacttcggtcaggttagttttcaccggaatagaggtgaaacggtgactacgtgcgcgctcttttcggaatgcagcaatatcgtcatcggtcagatctaccacgctgcgcaaagcgtccagcgtttgctgcacgttatcgactttctccggcatcatttctatctggtagatagtgcggttgagggccagagggataccgttacgatcgtagataatgccgcggctgggcgcgataggcaccagcttaatgcggttttcattagagcgggtctggtagtcggtaaagcgaacaatttgcagattatacaggttggcgataagcacgccggtcagcagcaaaatccccaaaaaggcgaccagcgcccggcgcacaaacagcgcggactctgccgtatagtcgcgaaaagagttctgtagtttcatccgctgcgttttctactcaaagctcccttatcactcacggtgataaggatggttggtggtgatgctccacgcccggtacagactctctgcgaccagcacgcgaaccagcggatgggggagggtaagcgcgctcaggctccagctctgctcagccgccgctttacaggcagggctcaacccttcaggcccgccaatcagtagactgacgtcgcgaccatccagcttccagcgttccagctcagcggctaactgcggcgtatcccagggcttgcctggaatatcgagggtgacaatgcggtttttgcctgcggccgccaacatctgctcaccctctttgtcgagtatgcgcttgatgtccgcattcttgccgcgttttccggccggaatttcaatcagctcgaagggcatatctttcggaaaacgacgcaggtactcggtaaaaccggtttgtacccagtccggcattttcgttcccacggcgacaagttgcagcttcacgcattaactccagagtttttccagttcatacaggcgacggctctcttcctgcatgacatggacaatcacatcgcccaaatccacgacaatccagtcggcgctgttttcaccttctacgccgagcggtaacaggcccgctgcgcgagactcctgcacaacgtggtcagcaatggacataacatgacggctggacgtacccgtacagatgatcatgcagtcggtgatgctggatttgccctgaacgtctaaggcgatgatgtcctgacctttgaggtcatcaattttgtcgataacaaaatcctggagtgctttaccctgcaagttttccccctgggtgaatcaaatagataaaaatggtctgtcagtatacctgaaccagaggcgatttcgggacaattgtcgccgaatcggctttcgaaagtgggctatcatcccaccccgcgccgcagattgcatcgccatttttgtaaaacaatttctacaaagtcgtgtctggcggaaaaagtctggctgcggagaatatcagcctgcccgggtctgtcaatggtcgttgcggcttacccgtaaaaaaacagaaaagtcatgcattctcgaccccgatggcacggctattgaggacgcgtagcgtcgcgaatttttggttgatatcaatggcgctccaacacccctggtcaacgcgaaaatgccacatagcttcggcaggcatgccaattaaacgggcgattaacagactcagtacaccctgatggctgacgactaaaatattctgatagtgctgaaattcactaagccttgcgataaagcgttccacacgttggctaaatgcctgaaatccttcaccgttcgtggggattgcatgctgccagtcattgcaccacgcgctatagttttcggcatcttcttgcatgaggtcgcgatgatgtcgcatctcccagtcgccaaaaaacatttcgttgagttcaggtatgatttgcacggggagctggcggtcactgagaaccagtcgcgcggtatgctgtgcccgttccagttcactgcataaaaccagatcaaaggaaacaccatgtagcagcgtatgcagattttgcgcttgctcaataccgcgcgcggtcaggggggtgggcgcatgaccgctgtaaagaccatcgatattcgcttgcgtttcaccatgacgaattaaccacagtcgcatcatgccctccgtaacgacaggtatcagcgatacaagccttgttggttaatgtaagtcagtaccggttccggcaataaatcctcacaactttcaccgttttgcaaacgttcgcggatgatggtcgcgctgatgttaaaccacggcgtttcagccagataaattttaccggcaggctgaaggtgaagatcttccgggttatgtgtcaaatgatcttccagccattgctggtattgcggttgcgccatttcaagtgggtaacctggacgccgacagacgatcaaatgtgcattgtcgagtatcgtttcgtattcgtaccaggtcggaaaggtcagcagactatcctgaccaataataaacgccagcggcacgtccggtccttgttcctgccgccactctttcagtgtttgcgcagtgtaagagggggcattgcgctttagctcgcgttcatcaagagtaaataatggcttgtcggcaatcgccagttcaagcatgtgtttacgctgcacgctgttcgcttccggctggggacgatgcggaggaacattattagggatgattgtgacccgcgtcagaccaatcaaattcgccagcgtttccacgggttttagatgaccatagtgcaccggatcaaaggtgccgccaaacagagcctgtaaagatttcatatcaaccgtcgataaatacgtccgccaggggtttatggcacaacagaagagataacccttccagctctgcccacacactctgaccgtaatcttgtttgagggtgagttccgttcgtgtcaggagttgcacggcctgacgtaactgcgtctgacttaagcgatttaacgcctcgcccatcatgccccggcggttctgccatacccgatgcttatcaaacaacgcacgcagtggcgtatgggcagactggcgtttcaggttaaccagtaacaacagttcacgttgtaatgtgcgcaacaaaataaccggttcgctgccttccagacgcagttgctgaagaatatgcaatgcgcgcttactttttcccatcaacaaagcatcaacccaatgaaaaggggtgaaatgcgcggcatcattcaccgcctgttcaacgcgcggtaatgtcaatttgccgtctggccagagcaggcttaaacgctccagtgcctgagccagcgccagcaggttaccttcataacagtagcagagcacctgatttgccgcgtcatccagttctaagttgagctgttttgcgcgcgcagcaacccagcggggaagctgagcctgctccggtgtctgacaggtcacctgcacgctgcgattcgcaagcgcagtaaaccaggcggcattttcttgcgctttgcttaatttattaccgcggacgatcaacagcaggtcgtcatgcagaagtccggtgagtgtgagaagttgctcattgatcgccgcattcggtccgttttctggtaacaacagcaatagcgtttgtcgactggcaaacagactcatagcctggcataagctaaagatcgcattccagtcagtgttgggatcaatggaaaaagtgtggtgttcttcgaatccttgtgccgcagctacctgacgaacagcgtcctggctttcctgcaataacagaggatcgttaccaagtaaaagatacgccgcgcgcagcccttcattgagctgcgcgcggagttgttccgggtacaaccgaatcatcagttacccagcgtggtggagacgcgtgcaggcgttgccggagtatccgttgtggtgctcgtctgttcttcgtcggaacgaatatccgcagcacggatgcttggcagcttacgaatcagctgttcggcagcacggtcgtacatctcttttacgatcatgtcttgttcgttatctttcgctaacgccatttgcgggttatcgaagaagctacggaagactttggcgctaatcgggtagatatcacggccggggatcaacacggtcgcattaaccgtcatgatcatctgatactctgctgtttgaccgttacggaatacgcttgcggtatctttcgcgatgctcactttacccaaacgcaaggatggaacgtccttacgcgtggtttctttatcaagcaactcgacaccattcagacgtaactggttacgcaccgcacggcttaatggcccgttcggatcgccactgtccaggatcatgaccttcatagtggaaggaacctgcgtggtatcacgcagatgccagccacacccggcggtgattaacaccgccagagataacaacaatgttgccagatatcgcacgcttcctcccgcgcttagccaacgaccagattgaggagtttacctggtacgtaaatcactttacgtacagtaacgccatcaagatattttgctaccagatgttcctggccagcacgttcgcgaacctgttcttccgttgcgtccaccggaacggtgattttggcacggactttaccgttaacctgcaccacgaccagcgtggagtcttccaccatcgctttttcgtcagcaaccggccacggcgcgttgtcgatatcgccttcgcctttcagttcctgccacagcgtgaagcagatgtgcggggtgaacgggttaagcatacggacaacggccagcagtgcttcctgcatcagagcgcgatcctgctcgccatcggttggtgctttcgccagtttgttcatcagctccataatcgccgcaattgcggtgttgaaggtctgacgacggccgatatcatcggtcactttagcgatcgttttatgcacatcgcgacgcagcgctttctgattttcagtcagcgcatcaacgttcagtgccgcaacatcaccttttgctgtgtgctcgtaaaccagtttccagacacgtttcaggaagcggttagccccttccacaccggattcctgccattcgagagtcatatcagccggagaagcaaacatcataaacagacgaacggtgtccgcgccgtaacgttcaaccatcacctgcgggtcgataccgttgttcttgctcttggacattttgctcatgccggtataaaccagttcatggcctgccgcatctttcgctttcacgatacggcctttctcgtcacgttcaacgatagcatcaaccggggaaacccagttacgttcgccgttttcgccaacatagtagaaggcatctgccagcaccataccctgacacagcaactgtttcgctggttcgtcagagttcaccatgcctgcatcacgcatcagtttgtggaagaagcggaagtagagcaggtgcataatggcgtgttcaataccaccaatgtagatatccaccggcagccagtagttagccgcttcggaatccagcataccttctttgtactgcgggcaagtgtagcgcgcatagtaccaggaggactccataaaggtgtcgaaagtgtcggtttcacgcagtgctggcataccgttaacggtagttttcgcccactccggatctgctttaatcgggctggtaatgccgtccattaccacatcttccggcaggatcaccggcagctggtcgtccggggtcggcattacggtaccgtcttccagcgtcaccatcggaatcggcgcgccccagtaacgctgacgggaaacaccccagtcgcgcaggcggtagttcactttacgctcgccaacgcccatcgcagtcagtttatcggcgatggcgttgaaggccgcttcatggtcaagaccgttgaactcgccagagttgaacagcacgcctttttcagtcagggcttgctgagaaagatctggctcagagccgtcagctgccaggataaccggtttgatgttcaggccgtatttagaggcaaactcgtagtcgcgctggtcgtgccccggtaccgccataactgcgcccgtgccgtactccatcaatacgaagtttgctgcccaaacgggaatttcttcgcccgttaatgggtgaaccgctttaaagccagtatcgacgccttttttctccatcgtcgccatttcagcttcggcaactttggtgttacggcattcgtcaataaaggccgccagttcaggattattttccgccgctttctgcgccagcggatgacccgcagctaccgccaggtaggtacaacccataaaggtgtccgggcgggtagtgtaaacggtcagcgtgttgtcatagtcgttaacgttgaaggtgatctccacgccttcggaacgaccgatccagttacgctgcatggttttaacggtgtctggccagtgatccagtttatccagatcgttgagcagctcgtcagcgtaagcagtgattttgataaaccactgcgggatctctttacgttcaactttggtatcgcagcgccagcagcagccgtcgataacttgttcgttcgccagtacggtctggtcgttcgggcaccagttgaccgcagaagtcttcttatataccaggccttttttatacagctcggtgaagaatttctgttcccaacggtagtattccggcgtacaggttgccagctcgcggctccagtcataaccaaagcccagcattttgagctggtttttcatatacgcgatgttgtcgtacgtccacggtgccggagcggtgttgtttttcaccgccgcgccttccgcaggcagaccaaacgcgtcccagccgatcggctgcaggacgtttttgcccagcatacgctggtagcgggcgatcacgtcaccgatggtgtagttacgtacgtggcccatgtgtagtcgaccagaaggatagggaagcatagacaggcagtaatacttctctttgctctcgtcttcggttacttcaaatgtgcgcttctcatcccaatgaagctgtactttggattctatctcttccgggcggtattgctcttgcatggcagccagtggtcctgttttcaatacggctacaaatgtagcgttgaggtggtttttcagatccgcatagcatagcccaaacgtccgcgtcaaaacagcctttcgcgcactcgacgttgaaatgatgcccggattattcatacattaatttacagagtttgtgggcgtattagcaaagcaaggaacaaagaacgtctattattatagtcagttaacgacccgggagatgaaacgatgaacaaggttgctcaatattaccgtgaactggttgcgagtctgagcgaacgcctgcgcaatggcgaacgtgatatcgacgcactggtggaacaggcgcgcgagcgcgtaataaaaacaggggagttaacgcgaaccgaggtcgatgagctgacgcgagctgtcagacgtgacctggaagagttcgccatgagctatgaagagagcctgaaagaagaatctgacagcgtctttatgcgggtgattaaagaaagcttgtggcaggagctggcagacatcaccgataaaacgcagcttgaatggcgcgaagttttccaggacctcaatcatcatggggtttatcacagcggagaagtggtcgggctgggaaatctggtctgcgagaaatgtcacttccatctcccgatctacacaccggaagtgctgacgctatgcccgaaatgtggtcatgaccagttccagagacgcccgtttgagccgtaatagtctgatttcgcacagcaataaagagaatatgggccgaatgaaattccccggcccttgtttttatctttacagtaaatcttcagtctcacgaatttcctgactgacatctctggttccggaactctgaactttacgatacaggtcgagagcctgtcggagatcgacaggtcttccttctccgtagtgatacataatggccaggttataccaggcagtggcgtcattgcattcagcggctttcgtaaaccattcaaaggcagcctgataatctttctcaacgccttgtccgtgtttatacatataaccgatgttgacgtaagcgccgacgctcccctgagcggcagccttcagataccagtacatcgcttgcttatagtcctggtccaccccttcgccagcgttataatcccatgcaatttgaaactgggcgtgccgattaccctgctgtgcgcttttcaaataccagaatgcggcgagtgtcttgttttgagcaacgccttttccgtcttcataaagatcggccagattgttttgcgcgtcactatggccttgtaatgcagcttgtttgtaccagaaaaatgccagcgcatagtcttttgcgactccgttgccatttctgtacatccacccaagattattttgcgcataagacattccgctctccgcggctatctgataccagacaaccgcttctttataattgggggcttctccacgatccagtgtccagccaagggcgttggaagcgaaagtatggccttgtagggcagcttttttcagccagaagatggcttgctcattatctttatgacggcttttatcctcggtatacttttgccctaaggaatactgtgcttcacaatgaccttgctcagcggccagcttcagccagtaaaaggctttttcgtcgtccggagaatcaattgcgctatcgcgattataataaaacccaacaatatattgagcctcgcaatcgcctttttcagcacgttcgataatctcatctatacttaaattatcgcagcaactactcgtgaaaatcattatcatttccttatggttgcagataaaacatattatatttttatgtgttccatttttgcgtaagccttattttatgcgtattatgtcgcgtcagaaaagtataaataaacgagcctcgcaatgcggctaatattcatttaatgaatatttaaggataaattatatggacatggagagccaaaaaatattgtttgcactttccactccgatggaaatacgcaatgaatgctgtttacctagccatagtagtcccaaaatgtatttaggtacatgcttttttgacctttcttccagttggggaattgatgaccgtgatgacctgctgcgcacaattcaccgaatgatcgataacggtcatgccgctcggttggcagggttttatcaccgctggtttcgttatagcccatgtgaatggcgtgactatcttgctgaactaaatgagcaaggtcaggcttatgcgcaatttgtcgccagcaccgccgaatgctgtggcgaagggggaatcaaagcctgggattatgtccggatgggttttttaagccgaatgggcgtacttaataactggttgagcgaagaagaaagtctatggatccagagccgcattcatctacgggctctacgttattatagtaactggcggcaatactttgccggttatacctttggtcggcaatattggcagtctcccgaagatgatcatctgcctttattacgcgaattcttagcgcgtaaagaatacgacgattccggcaatgatatgttttatcaattatttgccagtgatgatgcgtattaccctaccttgtcctggcaaccattggcttactattctgcatgcccggaaacgcttaaggatatgagcgacctatgaaaaattgctggaagatcctcgatatagaggaaacgactgacgtcgatattatccgccgcgcttatctggcgctgttaccgtcctttcatccagaaaccgatccgcagggttttaaacaacttcgtcaggcgtatgaggaggcgctacggattgcgcagagccctgctaaatctgtttggcaaccagaagaatatgaggtagcagaacatgaaattctgctcgcctttcgtgcgttacttgcctctgatagtgaacgttttctgccctccgcctggcagcgattcattcagcaattaaattattgcagcatggaggagattgatgaattacgctggagcctgtgcacaatcgccatgaacactgcccatttatccttcgagtgcgtggtgttattagcagaaagattgcggtggttacaggaggaaaataccggggaaatagacgaagaagaactggaatcctttttatatgccattgcgaaggggaatgtttttaacttccagaccattctgcatctgcccgttgccgtgcaaaatgacaccatcgatttttaccaaatgttcgctcggatttggagtagccatccacaatggctgacattgtatttagcgcaacatcgcgcagtgattatccccgatgatgcaaaactgcacagaaatttactccgctggtatagcgcaggtcgcctggatatccccgaacttctggattacgcccagagttggcgggaaactgaacctgataatgaagatgcgccttattatgaatacgcgcaacgcgtctattgtggagaaggcgaaagcctgttggcagaactttgtgactactggcgcgagtatccctccacccaggcggatgctttaatgttgcaatggtgccgtcagcatcgggtcgattattacccattactggtgatgatgattgaagcgcgtgatctggttaacgatcagggaaaaccgctactttatgtccccggcgacagcgcccgtacgcgttttcatttatacgaaatactcagcgatgaaaaactctctgcgctggggcgtagtctggtcgagatggttttgcacaaaggacgtaagccgcggatcagtctcacgcgtgatacagaacataccttatggccattatatctagttgccaaacaattagtgcaggcctgccaacctacagaagaaagtttaatgccgattgtgagccgccttgatgcagaaaatcgttgtccactggaagcattaattattcgtcgattattaattcaggcggcgaattttaccgagaagcaaactgttgaaccggagccgcaaccgcagccaatgcccgttgacgatggtgggccaggctgtctgggcatcattaaaattattttctatatttttatctttgctggtttgatagggaaaatactccatctgttcgggtgacagtcgacgttaatgtgcgggaagcccggcaagtaatctttccgcatttttgtaatgttgtttggcggtcagttttaaccatttttgagattcataatggttaacattaataccactgccatttctgtagatcaaacctaaagtatattgagcatgagcatacccttgttcagctgcttccttataccagagaattgctttacgggtgtcgggtttgacccccagacctttgaggtagatccaccccagtttactttgcgcgcgtggattttcctgttccgcactttgctcataccagtatctcgcctgtgtataatccagtggtttaccgtcgctaccatgaagataaaattctccaaggcgatattggctcgtactgtgaccatgaatcgcggaaagctccgtggctgccgtggtgaatggaagactgcccggactgcttaaataatcaaaggcataattcaccatggctttatcacgcaacgtcgttttcttgggttggctaatacaggtaattgctgcaactataaaaattgcgaatatatacattaattttttattcatgtgtgaatgcttcgattttctttttattttgaaagcgtcaagtttatactcatcaataataaaaaagtagtcagttaatgcacttaagggattattaacaaatgaataaggaagaacaatatcttctttttgcgctttctgcgcccatggaaatacttaatcagggttgcaaacccgcgcatgacagcccaaaaatgtatactgggataaaagaattcgagctcagtagttcctggggaataaataatcgtgatgatttaattcagactatttatcagatgactgatgatggtcatgccaatgatttagctggcttatatctgacatggcatcgctcttcccctgaagagtggaaagcattaattgctggtggcagcgagagagggttgatttatacccaattcgttgcccaaaccgctatgtgctgtggggaagggggaatcaaagcctgggattatgttcgaatggggtttctgagtcgggtcggtgtgctcaacaagtggctgacggaagaagagagtttatggctgcaaagccgcgtctatgtacgagctcaccattactatcacagctggatgcactatttttccgcctatagcttaggacgtctctactggcaatcttctcagtgcgaagacaacactagcctacgcgaggcgctaaccctgtacaaatacgatagcgccgggagtcgtatgttcgaagagctggcagcgggaagcgatcgtttctatgccacgcttccctggcagccattaactgtccagtctgaatgcccggtaacgcttaaggatgtgagcgacctatgaaaacatgttggcaaatcctcgaaattgaaagcacgacgcaaatagacattatccgccaggcttatcttgctcgcttaccgttgtgtcatcccgaaaccgatccgcaagggtttaaagcattacgccaggcctatgaagaggccctgcgactggcggtaaatcctgtcgaggaagcagatgatgaagaaaaagatgctgccgctgaacatgaaatactacgtgcattcaggacattactggatagtgaaagtgatcgttttcagccttccgcctggcagaaatttattcagcaattaaatacctggaacatggaggatgtcgatcaattacgctggccgctgtgtgcaatcgccatagaagcgcgatatcttagtttaaattgtgcttctttgctggcagagcgtttgaactggcatagttttaatgacagcgaaggaatggatgaggaagaaagggaggcttttcttgaggccattcaggctggtgattgtttcgatttccttagccttctggaatatcccattgcgttgcagaaccagactgttgagtattacttcgcgctggaacgttgctgccgttaccatcctgactatgtcactgcgtttttggcgatggaaggtccgtggttaattcctgatgatgcaaagttacatcgcaaactgttgcgctggtacagcagcgtgcaaacaggtatggcggaactcattcctgtcgctcaacagtggcaaacggaagaaccagaaagcgaagatgcccggtattacttgtgtgcacaacgtttgtactgcggcgagggggaaagcctgcttgccgatctctgcgcgtactgggaaagttacccatctacacaagctgataatttgttgttgcagtggagcaagcgtcattgcccggattatttcgcgttattagtgatggttatcgaagcgcggagcatggtagatgcgcaaggtcaaccgctgaaatatgttcctggtgagagcgcccggacgcggctgttatgggcggagattttacatagcggaaaattaagcccgttaggtcaaagctttattgagagcttattcttcaagcgcaaagcatgggcgtggtggaaaagcagagtcggtagcgagacagagcaagatagtccgttcctggatttgtatcgggtagcggaacaggtagtacttgaagcgtttccgaaacaagagatgctggcccgtcttaatacaaggctggaaggcggagatgctcatccattagaggccattgtcacccggatgcttttgacgaaagtgaaactcgagccggaggatgaagatgtcgatgagccaacacctgaaaatcatgaagaaaaaaatgatgagggtgaaaaaccacagagcattaccagcattatcaaaatcagtttaacggtgctggtgataggttatgctctcggcaaaatcgcgatgttgtttagctgacgatgtgttttttgcgccgatgccggatgcagcgtttacgccgcatccggcagccgtgtttatgggatctcaatggctaaataatcgctcgcccgccgccgaacttcatccacgcgggccatatcgttactctgcaacgccgcatcaaaatcggtgatcacccggccgatctcttctcgctcgtcacccagcgcccgcgcccacaactcttccagtttggctttaaaggtgcgattgatgagcatatcgcgcggataaattttcaatgcggataaccgcgtccgactctcttcaatctgctgcgcgctcaatgttaccgggctgtggttaatcactctggacttaacgctgccgtcttccagaagcacgtcaacttcaagcaacccgttgatatcataactaaagcgaatatcaatgctctgataagccccggttttcttcaacggcacatcgaaggattccaccagaatgttgtttttaactttgtggttttctccctgatagacgttaaccgtaatactatcctgttccgggtgcatggtactataagtttctacacggctcacgggcacagtggtgtttcgttcaataatcgggctgaaaatgccggaaacgccctggcggttaacttcaacgcccaagctgtaagggcaaatatcagtgaggattacctcttcaatatcttcactgcgtaagcggcaggcggcctggattgctgcgcccagcgcgacaatggtgctcggatcgtaactttgatacggtaatttgccaaacagacgcacggcgattcgctgcaccagcggcatttgactcgcgccgccaaccagcaccagactgtcgatttgactcggcttcagacgcgcatcgcgcaacgcctgttcaatcggcactcgcaagcgattgagcagcggcaaccacaaatcttccagttcgttctcgtaaaattcgcattcccgcgtttcttcctgatactgccagcgaatgtgcaatgggctttgattgctacattttgccgcttccacacaggcgtacaaggctgccagttcactctcgttaagcgtggtcctggcgacatccgcgcgttttaaaacctcatcgaccagcatatgggtaaaatcttcgccaccaagaaagttgtcgccagcggaggcgtgaacttcaatcaccggcgtggcgtactcaagcaccgtaacgtcaaacgtgccgccaccgagatcaaacaccaggctacgggtattttgttgggtatgcaggccatacgccatcgcagctgctgtgggttcattaattaagcgtaccgcatttaacccggctaactccgctgctaaacgggtatgcttgcgttgttcatcgctgaaataagccggaacggagatcaccacatctttaatcggacgttgcagaaattcttcggcatcttcttttaaactgcgtaataccaaagaggacagttctggcgcgttaaatgtgtcgctgcctaaccgccagttggtattactgcccattgcacgtttaaataacgctgccgttttatccggatggctagtacgccgacttacagccggttttccgactaaaatatgattattttcatccatgctaattatggatggtgttaaatattcaccgaacttatttggaattaattgcgcggcaccgtctttccagacggcaattaaactattggtagtaccgagatcgataccaatggcgagttctgcattatccattgcatttatatcttgaaagaaaaagagataaacagattaagaccacccaggtaacgcgtggtgatcttaatcaatgacgtgtgttaagcgtaaaatttcagacgatcagccagtaaatcaacaaagccctgacgatcaacatcgaccattacggtggcattcggtttattgcctgtcagataataataatcaacaaccgtcataccctgggtatatttcccctgtgtttccacgccaacccagcgctcaacagaggtaaataactccggtttcaacagccaggcgatggtgcatgggtcatgcagtggtgcgccgacaaagccccatttttcgtctttatgatattcgaggaagaaatccagcagttcggcaacaatggtactaacagggttaccaatcgcgcggaaacgctcggtgtcttcaacgtggatttgtgctttatgagtaacatccagaccggccatcaccaccgggatcccactctggaagacaatttctgccgcttccgggtcaacgtaaatattaaattcagccgcaggcgtccagttacccagccccatagcgccacccataatcacgatacgggcaattttgctatgcagttccggatggctattgagcagcaaggcaacgttagtttgcggtccggtagacacaatggtgacaggttccgcactttcacgcagcgttttcgccatcagctctaccgccgtacagttttgcggtgcgaatgtcggttccggtaatgccgggccgtcgagaccgctttcgccgtgcacattgtccgcgataatcaactcacgcattaacggttttaccgcgccgcctgctaccggaatatcggtgcgattaagcaaggtcagcatacgcagaacattgcgtaaggttttttctggtgtctggtttccggcggaagacgtaattgctttgacatcaagctctggactggcgagggcgagaactattgcgatagcgtcgtcatgacctgggtcgcaatctaacagaattggcagtgccattgttgctccttgttgtgtgcttctttgcgacaagggtaacgccaggatgtaacagatacgaggggcgaaacgataaagcgtgagatggcgcgcaattgggtatgcgcgccagagtgattaatgcaggattttcgcgaggaagtcttttgcgcggtcgcttttcggatcatcgaagaaagcgtctttcgggctgtcttcgacaattttaccctcgtccataaagatcacccgattcgccactttacgggcaaagcccatttcgtgggtcaccaccatcatggtcattccttcgttcgccagttccaccatcacgtccagtacttcgttgatcatctccggatccagcgcgcttgtcggttcgtcaaacagcatcgcaataggatccatacacaacgcgcgagcgattgccacacgctgctgctgaccgccggaaagctgcgccggaaacttattggcgtgagcagaaagcccgacacgctccagcagtttcagggctttttcacgagccggcgctttatcgcgtttaagcactttcacctgcgccagggtcaggttttcgataatgctcagatgagggaacagctcgaaatgctggaataccatcccgacgcgggaacgcagctttgccagatcggttttcttgtcgttaaccacgataccatcgacggtgatttcaccttgctgcaccggttcgaggccgttgacggttttaatcagcgtacttttgccggaaccagacgggccgcaaaccaccaccacttcgccttttttcacttcggtactgcagtcggtcagcacctgaaagtgaccataccatttactaacatttttcagggtaatcattatgctgtccttcttttcaagtagctgaccaacaagctcgcgctaagactaataacgaaataaacaaatccggcaaacaggatcatctcaacctgcgtaccatcacgctcaccaatggtactggcggtacggaagaaatcggccagggataacacatacaccagactggtatcctggaacagtacgatgccctgagtgagcagcagcggcaccatcgcgcggaacgcctgcggcagaataatcagtttcatgctctgccagtgagtcattcccaacgccagcgcggcgctgctttgaccacgagaaatactttgaataccagcacggataatctcactatagtaggccgcttcaaacatgctaaacgccaccatcgcgctaattaaacggatatcattttttgggcttaatcccagcacgttttgcagaaaacccggcacgatcaggtaaaaccacagcaaaaccataactaaaggaatgctgcggaatacgttaacgtaggctttggcaaaccacgccacgggcgcaaagctggataaacgcatcaccgccagcatcgtgccccacaaaataccaatcactaccgccgtgacggtgattttcagggtgatcaccagcccgtcgagcagatatggcagggaagggacaatggaactccagtcaaactcgtacattatttgccccccatgttgccaggcaggcgaactttacgttcaaccagcgtcatcaccagcatgataaaagcgttaatcaacacatacgccagcgtaatggcggtaaagctctcccaggcatgggcactgtaatcgagcaatttacccgcctgcgccgccatatccaccagaccgatagtgctggcgatggcggagtttttcaccaggttcatcatctcactggtcatcggcgggacgataacgcgataagcattaggcagcagtacgtatcgataagcctgcggtagcgtcaggcccatcgccagcgcggcatttttttgccctcgcggcaggctctgaatcgcggcgcgtacctgttcgcaaacacgggcggcggtaaacagccccaggcagagcatggaactaaggaaaaactgaatattgggatccagctcggccttaaaccacatgccgattttctccggcagcagctccgggatcaccagataccaggtaaagaattgcacaatcaacggcacgttgcggaacagttcgacatacaacgtacccagaccagagagaaaacggtttggaacggtacgtaaaatgccgaaaaaactaccgacgaggaaagcgataatccaggcgcagatgctcaaagcgatcgtcacctgaaaaccactccagatccaaccaagataggtggtgttgccgaacggggcttgttgtaaaaaaataccccagttccagtctatagacataaatctactccagaaaaaagagggtagcagcgttaactgctaccctcgaagattgttacccagcgtattgcggttttcaggcccgatggggaacgaccatcaggcgtatagtctgtccgtgctacgtaacaatcgagagggctggaatttccgcccctggttcttgtaattagttcagtgccttgtcattcggttctttgaacagtgctttcatttcgtcactcagttcgaaattcatgttcaggtttttcggcggaattggatttttgaaccacttatcaaaccatttttccgcttcaccggaggtctgcacctgagcgatggtgtcatccatcagctttttgaactgcggatcatctttacgcaacatacaaccgtaggcctcctgagactgcggcttgccgacgatttcccagttgtctggtttcttcgctttcgcacgttcaccggccagcagagcgtcatccatcataaaggcaacggcacgaccgctttccagggtgcggaaagagtcaccgtgatctttggcgctgatgatgcgcatattcattttttgctcttcattcagtttgttgagcaaaacttcagaggtagtgccggaagtgacgactacggctttgtctttcaggttggcaaaatctttgatatcgccaccctttttggtcaacaggcgcgtaccgaccacgaaaatagtgtcagagaaagccgcctgtttttggcgttcgacgttgttggtggtagaaccacattcaaaatcgaaagtgccgttttgcagcagtggaatacggttttgactggtaatcggaatcagttttacctgcaagtccggtttgttgagtttctttttcactgcttcaacaatggcgttggagtaatcctggctgtaacccaccactttttgctgattgtcgtaataagagaaaggcacactagattcacggtgaccgacgacaatcacaccgtttttggcgattttgtccagagtactgcccgctgccggggcggcgtcatctgcctgtgccagtcctgcggaaagcgccagggcgaggattgctgtggcaggtttacgtaattgcatatccaactcctttatcttctgcgttaagaacgcatggatacccgttgtgagtgtttgtgttgttatcgtctgcaactttattgtgcagtgttgtgcctgttagggaaggtgccttaggtaacatttagtttggctaaatgtaaagatattgctgttttattgtttgtttttgcgagatgcgccgcaccattccgaagcaaaattcttaaaatgcactcttttagtgctaccgctggattactgtggtgcaactaggttgtactgatgctgtttcagggtttgccttgtataacaaagcaatagatgtgccaaagttggataggagaatattgttatccggataatgcactgatgccgcatccggtgagcgtgccgaaatatgggatgtattccggcacgataagaagggattatttacgtcgctgacgcagactcatcaacacagcagcaaaaccaaacaatgccgtcagcacccacagcggccagttgccggtacgtgcgtatggtgtgagtccggtggtcggcgtcacgttagtggttaacacctcgcgggtgaactgcgggatcatcgcctgaatctcaccctgcgggccaatcaccgccgtaatgccgttgttggtgctgcgcaacagtgggcgcgccagctccagcgcacgcattcgcgccatctggaagtgttgccatggaccaatagatttaccaaaccacgcatcgttggagatagtcagcagatagtcggtatccgggcggaagttatcgcgcacttgctcgccgagaatgatctcgtagcaaatagccgcagtaagctcaataccatttgcgctcagcggcggctggatatatggcccacggctgaagctgctcatcggcagatcaaagaacggtgctaacggacgcagaatgctctccagcgggacaaactcgccaaacggcaccagatggtttttgttatagcgatcggcactttcgtagctgtacggcgcacctttacccagcgtgatgatggtgttgtaggtatcgtagcggttctgcttattgagacgcgcgtcgacaatcccggttaccaggctgctacctttatcacgcaactcaccgtccagtgctttgaggaacggttgctgattaatttccagatcggttatcgcgctctccggccagataatcaagctacttttgcccatcagcggtgccgttgcgttgtagtaaatcttcagcgtattaagaagctggccttcgtcccatttcaggctttgcggaatatcgccctgaaccatgctaacctgaatggttttctccggttgtggggtaaaccactggatgtaacgcagcgggaagggaagggcaaacagcacgacggccaccaccagcggacgccagttgcgtttgaccaacgccagtgccagcaggccactaaccatcatcagcaggaagttaatggcttccacgcccattatcggtgccagcccttttaacgggccatcaatctggctatagccgaactgtaaccacgggaagccggtcagtacccaaccgcgcagaaactcggtcacttgccagagggcaggggcggcaatcgctacgcgcagccaggtggttttcggccacagacggctcagcacgccagcaaacagtccggtatacaggctcaaatacgccgccagcagcaccaccaggaagatgttaaccgggccaggcattccgccaaaggtcgcgatgctgacatagacccagttaataccgctgccaaagaggccaaatccccagcaaaagccaatagcggcagactggagtggacggcggttaaaggtcaacgcctgaagccccatcaggctaataatcgccgcaggccagacgtcgtaaggagagaaggccagcgttccgcaggcaccgaataataacgccagcagcaggcgaatgcgctggcgttcaattaaactggcaaaagccatgtagttatctatccagtttcggttttattcatccagcttcggctggggactgtcatccgggattttgacatgaacctgaataatacgccgactgtcggccatcgccactttgaactggtaaccgtcgatgtcgatagtttcgccacgcgccggaagatgcccaaatgcctgcatcaccagaccaccgatagtgtcgacttcttcatcgctaaagtgggtgccgaacgcttcgttgaagtcttcaatggaagccagtgcgcgtacggtccaggtatgacgactcagctgacggaagtcgatatcatcttcttcgtcatactcgtcttcaatctcaccaacaatcagttccaggatgtcttcaatggtcaccagaccggaaaccccaccgaattcgtcaataacgatcgccatgtggtaacgctgagagcgaaactctttcagcatccggtctacgcgcttactttcaggaacgacaaccgcctgacgtaacactttgtccatgctgaaggcttcagcatcgctgcgcataaacggcagcaagtctttcgccatcagaatcccttcaatgtgatctttgtcttcgctaatcaccgggaaacgactgtgggcggactcgatgatgacatcaagacattcgtccagcgtctggttgcgtttcagggtaatcatctgggagcgggggatcatgatgtcgcgaacgcgttggtctgcgatgtccatcaccccttcgagcatatcgcgcgtatcttcgtcgataaggtcgttctgcccggaatcacggatcagcgccagcagttcgtcacggtttttcggttcaccgtggaaaagttggctgagtaacagggagaaaaatcccttcttgttgcttatcgtgtcactactgtgactattgtcgtcgctcatggcgtcgtatgggttctcatgttagttaatcaaaacgccgtcgttaatcaccaacggcggggacgtctgccagtcaaatgcctggcaaattattctttctcggcaatgtacggatcctcatagcccagagcaagcataatctctgtttcgagggcttccatttcttctgcttcgtcatcttcgatgtgatcgtaacctaacaaatgcagactgccgtgcaccaccatatgcgcccagtgcgcctccagtggtttgccttgctcctgagcttccttctcaaccacctgacggcagataaccagatcgcccagtaggctcatttccatgccaggcggcacttcaaacgggaaggagagcacgttggtcggcttatccttaccgcgataggtcagattcagactgtggctttcggcggtatcgaccacgcgaatcgtcacttcgctttcttcctgaaactgcgggatcaccgcattcagccatgtctgaaactggctctcttccggtaacccggaattatcttcacatgccagttgtaaatcgaggatcacctgactcatttttgttcctgttcttcgcgcttgcgttctgctgccagcgccgcttttcgtttttgttcggcttcttcccaggcttcataggcgttaacgatacgcgccaccacagggtgacgaaccacgtcttcgctgtggaagaagttaaagctgatctcttcgacatcggccagcacttcgatggcgtgacgtaagccacttttagtattacgcggcaggtcgatctgtgtgacgtcgccggtgataaccgctttactgttaaaaccgatacgggtcaggaacatcttcatctgttcgatggtggtgttctggctctcatcgagaatgataaacgcgtcgttcagcgtacgaccacgcatataggccagcggtgcgacttcaataacgttgcgctcaatcagtttctcgactttctcaaagcccagcatttcaaacagcgcgtcgtacagcgggcgcagatacgggtctactttctggcttaaatcgccaggcaggaagcccagtttctcaccggcttctactgccggacgagtcagcagaatacggcgaatttcctgacgctccagggcatcaactgccgcagccactgccaggtaggttttacccgtacccgccgggccaacgccgaaggtaatgtcatggtcgagaatattggcgatgtactgcgcctggtttggcgtgcgcggcttaattacgccgcgtttggttttgatattgaccgctttgccgtactccggcacgctctccgcgctttgctccagtacccgcgcttctttaatcgcaaggtggatctgttccggttcgatatcctgaatctgaccgcgcatcggggcagtatcgacatacaggctacgcagaatgtctgccgcagcggtgacgcaaatcggacggccggtcagtttaaagtggttatcgcggcgattgatctcgatgccgagacggcgttcgagctgcttgatgttgtcatcaaacgggccgcacaggctcaacagacgcgcattgtctgctggctccagggtgatttcgcgagtgtctatgttcaaaccgttcctcttatctgtatgccgccggaagctgaacattcaccggcctataaggaaattattcacgccacaggaaaaaggcgcaagcattgcaataaagatggggataaagagagaaaaaacaaggcccaccggaacggcaggcctgagaattacggctgataataacccacgccaaggtcgttttctttgcgggtacgggcaatcacactttccggtgtttctgccacgcgcagacccatttcatcttcagtacgcaccactttaccgcgcagagagttcgggtagacgtcggtaatttctacatcgacgaatttaccgatcatatccggcgtgccttcgaagttgaccacgcggttattttccgtacgcccggaaagctccatgatgctcttacggcttgtaccttctaccagaatacgctgggtggtgccgagcatccggcggctccacgccatcgcttgctgattaatgcgctcttgcagaatatacagacgctgcttcttctcttcttccggaacatcatcaaccatatcggcggctggtgtacccggacgtgcagagaagataaagctgtagctcatgtcgaaattgacgtcggcaatcagcttcatcgttttctcgaagtcttcggtggtttcgccagggaagccaacgatgaaatcagaactgatctgaatatctggacgcgccgcacgcagtttacggatgatcgctttgtactccagcgccgtatgggtacggcccatcaggttcagaatgcgatcggaaccgctctgtaccggcagatgcaggaagctcaccagctccggcgtgtcgcgatacacttcgatgatatcgtcggtgaattcgatcggatggctggtggtaaagcgaatacgatcgatcccgtcgatcgcagcaaccagacgcagcagatcggcaaagcttccggtggtgccgtcgtagttttcaccacgccaggcgttcacgttctgaccgagcaggttgacttcacgcacgccctgagccgcaagctgggcaatctcaaacagaatatcgtcggacggacggcttacctcttcaccacgggtgtaaggcaccacgcagtaggtgcaatatttattgcagccttccatgatggagacaaacgcggtcggcccttcggcgcgcggttccggtagacggtcaaacttctcgatttccgggaagctgatatctacaaccgggctgcggtcgccacgcacggagttgatcatctccggcagacggtgcagcgtttgcggcccaaaaataatatcgacatagtgggcgcgctggcgaatgtgctcgccttcttggcttgccacgcagccaccgacgccgataatcaggtctggattcttctcttttaacagtttccagcgacccaactgatggaagactttttcctgagccttctcgcggatactgcaggtgttcagcagcagcacatccgcttcttccgccacgtcggtcagttgatagccgtgggtggcatccagcagatcggccatcttgctactatcgtactcgttcatctgacagccccaggttttaatatggagttttttggtcatcgacttgctcttgcgaaatagtagccaggaatgcagggcgcatagtgtaatgctttgctgccgttgtgaccagtatgagcgttatcagcccttaggggtaaaaatcctgtaaacttaaagcatattgctaacaggatgattgaccatgacaaatcaaccaacggaaattgccattgtcggcggaggaatggtcggcggcgcactggcgctggggctggcacagcacggatttgcggtaacggtgatcgagcacgcagaaccagcgccgtttgtcgctgatagccaaccggacgtgcggatcagcgcgatcagcgcggctagcgtaagtttgcttaaagggttaggggtctgggatgcagtacaggctatgcgttgccatccttaccgcagactggaaacgtgggagtgggaaacggcgcatgtggtgtttgacgccgctgaacttaagctaccgctgcttggctatatggtggaaaacactgtcctgcaacaggcgttgtggcaggcgctggaagcgcatccgaaagtaacgttacgtgtgccaggcagcctgattgcgctgcatcgccatgatgatcttcaggagctggagctgaaaggcggtgaagtgattcgcgcgaagctggtgattggtgccgacggcgcaaatagccaggtgcggcagatggcgggaattggcgttcatgcatggcagtatgcgcagagctgcatgttgattagcgtccagtgcgagaacgatcccggcgacagcacctggcagcaatttactccggacggaccgcgtgcgtttctgccgttgtttgataactgggcaagcctggtgtggtatgactctccggcgcgtattcgccagttgcagaatatgaatatggcacagctccaggcggaaatcgcgaagcatttcccgagccgtctgggttacgttacaccgcttgccgctggtgcgtttccgctgacgcgtcgccatgcgttgcagtacgtgcagccagggcttgcgctggtgggcgatgccgcgcataccatccatccgctggcggggcagggagtgaatcttggttatcgtgatgtcgatgccctgattgatgttctggtcaacgcccgcagctacggcgaagcgtgggccagttatcctgtcctcaagcgttaccagatgcggcgcatggcggataacttcattatgcaaagcggtatggatctgttttatgccggattcagcaataatctgccaccactgcgttttatgcgtaatctcgggttaatggcggcggagcgtgctggcgtgttgaaacgtcaggcgctgaaatatgcgttagggttgtaaccttacaacattgccggatgcgtgccaaccgtaggtcggataagacgcggcagcgtcgcatccgacattgaaggataagacgtgtcaacatcgcattcgacattgaatgaacgcagaaaagcaaaaagctcgccgaagcgagcttttttaatgtggctggggtacgaggattcgaacctcggaatgccggaatcagaatccggtgccttaccgcttggcgataccccaactgggtgcacttacaaggtaagcgtcttgaataaattggctggggtacgaggattcgaacctcggaatgccggaatcagaatccggtgccttaccgcttggcgataccccaacaaattggttttgaatttgccgaacatattcgatacattcagaatttggtggctacgacgggattcgaacctgtgaccccatcattatgagtgatgtgctctaaccaactgagctacgtagccagattgtttcttcgatggctggggtacctggattcgaaccagggaatgccggtatcaaaaaccggtgccttaccgcttggcgataccccaataaccgggcggtgaaccgcttactcgaagaagatggctggggtacctggattcgaaccagggaatgccggtatcaaaaaccggtgccttaccgcttggcgataccccatccgtacaacgctttctggtgaatggtgcgggaggcgagacttgaactcgcacaccttgcggcgccagaacctaaatctggtgcgtctaccaatttcgccactcccgcaaaaaaagatggtggctacgacgggattcgaacctgtgaccccatcattatgagtgatgtgctctaaccaactgagctacgtagccatcttttttttcgcgataccttatcggcgttgcggggcgcattatgcgtatagagccttgcagcgtcaacctctttttcaaggaaaattgctcgaaagtgactgtttggttaggttgcgaacagcgtggcgctatattcgtcaattattgtttactttgtgttttttcccaccctacagccattcttttgtcatacaggatgaaattcggaatttaacaatagtggtgggaaattaatctatgaaatactggcctacagtgatgagttgtcaaacagtgatgtggcaaacccggaacatttccttactgcatatcagaatcaacaagcacctcaataactgaaacagccccggatttcaccggggctgtttcgcatttcttacttatacgcgctctggtgaacaccaaccgcgcgaccagacggatcgtccattttcttgaacgcttcatcccattcgatcgctttagcggaagaacaagcgacggaaggaccgcccggcacgcactcagcggcgctcggaagcgggaatagttcttcaaagatctcccgatacaagtacgcttctttagaggttggcgtgttgtacgggaagcggaagcgggcagtttccagttgctgatcagaaacctgctgcgcagccacttctttcagggtgtcgatccaactgtaaccgacgccatcggagaactgctctttctgccgccaggccacgcttgcaggcagatacgcttcaaaacattcacgcaggatgtgtttttccattttgccgttaccgcacattttatcctgtgggttaatacgcatcgccacatcaaggaattttttgtcgaggaacggaacgcgtgcttccacgccccaggcactcatcgctttgttggcacgcgcgcagtcatacatatgcagggccagcagtttacgcaccgtctcttcatgcagttctttggcattcggtgctttgtggaagtaaagataaccgccgaacacttcatcagaaccttcaccggacagcaccattttaatgcccatcgccttgatcttacggctcattaaatacatcggtgtactagcgcgaatagtggtcacatcataagtttcgatgtggtaaatcacgtcgcggatggcatccagaccttcctgtacagtgaagtgaatttcgtgatgcaccgtgcccagatggtttgccacttcctgggctgctttcagatccggactacccggcagacctacagcaaaggagtgtaactgcggccaccaggcttcagagcgttcctgatcttccacgcgacgggctgcgtatttcttggtgatagcggaaataatactggaatccagaccaccagaaagcagcacaccgtaaggcacatcagacatcagatggcttttaacactatcttccagtgcctgacgcagctcgtttttgtcggtcacgttatctttcaccgcatcgtagtcgaaccagtcgcgatgatagtaagaacggatttcgccgtcctggctccacaaatagctccccgccgggaactctttaatcgtgcggcaaactggcaccagcgctttcatttcactggccacatacagctgaccgtgttcgtcataccccatatacagtgggatgatccccagatggtcgcgaccaatcaggtaggcatctttttcgctgtcgtacagtgcaaaggcaaacatgccctgcaagtcgtcgagaaattccggccctttttcctgatacagcgcgaggatcacttcacagtcagacccggtctggaactggtaacgatcgccatattcggcgcgcaatgcctggtggttgtagatttcaccgtttaccgccagtacgtgggttttttgttggttgtagagaggttgcgcccccgcgttaacgtcaacaatactcagacgttcgtgggcgagaatggcgttatcgctggcataaataccggaccagtccgggccacgatgacgcatcaggcgactcagctcgagggctttcttacgcagctcaactgcgtctgttttgatatcgaatacgccaaaaatactacacataaccttctccgttaacctggtatttgttgcttgttgtgtttgcttgtttaaaaaaatgccgcaaagcagcactgtgcgcaagcgatttggcggtgaaaaaataaaaaacgtaatggtgattgtcgattggtgaaaaaaggtctggtgtgaggatatatttattgatgaatcgataatttttagcgggttttattgaatgtttatattttacgggggccaaattgctgacaaagtgcgatttgttcatgccggatgcggcgtgaacgccttatccggcctacaaaagcatgaaaattcaatatattgcaggagctgcgtaggcctgataagcgtagcgcatcaggcagtttggcgtttgtcatcagagccaaccacgtccgcagacgtggttgctattcagataacgtcgatttcagcgacactcgggtaaatccagctggggcggaaaggcatactgtcgatatcgtcgaggctgctaacaccagaaagcaccagaatcgtctccagacctgcctggaagccggccagaatatcggtacgcaggttatcgccgacaatcaccgtttcttcgctatgcgcctgcattttgtttaatgctgcgcggatgatccacgggctgggcttaccaacatagaacggtttgcgcccggagattttctcaatccctgcacacaacgcgccacaagcgggataaaaaccgcgcccgtgggtgtccggattggtggcgataaaacgtgcaccgttagcgacgaaataggctgctttatgcatcatgtcccagttgtaggaacgcgtttcgccaacaatcacgaaatcagggttcacatcggtaatagtgaaaccggctttgtacagttcatgaatcagtgcgccttcgcccaccacatacgctttcttgccttcctggcgacgcaggaaatcggcagtcgccatcgcagaggtataaaacacgctgtcaggtacatcgacacctgcggtggcaaagcggttcgccagatcttgcccagtctggctaggatagttggtcagcaacaccagcggcaggcctttatccataatcccgtgcaaaaattccgctgcacccggtacggcgacgttatcgtgcatcagcacgccgtcgatatcgcaaattacatttttaatggtcatggactacccagaatattgacaacaataagcgccactataaaagcacattaattttccagcaaatgctggagcaaaataccgttgagcatggcgcgttttaccagcgcaaaagcgccgattgcgctgcggtgatccagctcagaacgtaccaccggcagattagtgcgaaacgccttcagcgcctgggtattaatgcagctttcaatagcagggagcagcactttatcggcttcggtgatttcaccggcaataacaattttttgcggattaaataagttgatagcaatggcgatggttttacccagatgacgaccgacatactcaattacttcgctcgccagactatcgcctttgttcgcggctttgcagatagttttgatggtgcagtcgtccagcggcacgcggctctggtagccctgctttaacagattcaacacccgttgttcaatggcagcgttggcagcgatagtttccaggcagccaaagttgccgcagtggcagcgttcacccagcggttcgacctgaatatggccaatttcaccgacgttgccgttgcggccaataaaaatgcgcccgttagagataatcccggccccggttccgcgatggacacgcaccagaatggagtcttcgcaatcctgacttgcaccgaagtagtgctccgccagcgccagactacggatatcgtgaccaacgaaacaggtcactttaaaacgttcttccagagcttctaccagcccccagttttctacctgaatatgcggcatgtaatgaattttgccgctgtccgggtcaacaagccctggcaggatcacgctaatcgcgatcagctcgcgcagtttgcgctggtagctatcaataaactgagcaatggcattcaacagggcatgttccagcgtttgctgggtacgttccggcagcgggtaatgttcttctgccagcactttgctgctgagatcaaacagagtgatggtggcgtcatgacgaccaagccgtacgccgattgcgtggaaattgcgggtttcggtgacgatggagatagcgcggcggcccccggtggaggcctgctgatcaacttctttgatcagcccgcgttcgataagctgacgcgtaattttggttacgctggcgggggcaagctggctttgctcggcaatctgaatccggctgattggcccgtactggtcaatcaggcgataaaccgccgcgctgttaagctgttttacgagatcaacattacctatctgagcttgtccgcctggtgtcatactttctcttattgagttacgacctcgttaccgttaacgatggtcttggtgattttaaaatcaggtgtgaatgcagtcaggttggctactttacctgcggcgagtgtgccgagacgtttctcaacgccaatcgcacgcgccggatagagcgtcgccatacgtagcacttcatccagtgcgataccgcaatgttcgaccagattacgcacgccttcaatcatggttaaggaactaccgcttaacgtaccgttctcatccacacaaagtccgttacggtagtatattgttttacccgcaaaaatgaactgttcaatgttggcacctgctggcgcggtggcgtcagtaaccagacacagtttgtcgcctttcagacgtttagcgttgcgaatgttggcgtaatcaacatgcaggccatcagcaataataccgcaataaatgtcagcttcgtcgaggatcgcgcccgccaggccaggttcacgaccggtaatatacggcatcgcgttgtacagatgggtggcaaaggtaatccccgcgcggaaaccggcttttgcttctttcaacgtcgcgttggagtgaccggcagaaaccacaatcccggcatttgccagtttgctgatgacttccgcaggaaccatttccggtgccagggtcactttggtaatgacgtcggcgttttcacacaggaaatcgaccagcgcggcatcaggcttacgcacaaaattcggattatgggtgcctttttttaccagattcagccacggaccttccagatgcagacctaacgcctgattcggatgttttgccaggtactcgcgcataacgcgcacgccctgtttcatcagctcatcgctggtggtgataagcgtcggcagatagttagtacagccacttttctcattggctttctgcatgatttccagcgtttccacgctgaccgcttcagcggtgtcgttaaactgtacgccgccgcagccgtttaactgcacatcgataaaaccgggggagagaatggccccgttcagactacgttgttcgatctctggcggcagttccgctaccggacagacgcttttaatcaggccatcagcgataacaaccgcgtggtcatcaagaaattcgtggccggtaaagatccggccctgggttaatgcatacattctgacccccgattttaaaaaatattgccctgagcaaggagccagggcagggataacaattacagacctttgatattttctgcttctaattcattgaaatatcttaaagtcttaactttcagctccatggtggaaggttcatcgcacaccatgatcgctttcggatgcagttgcagacagctgatggtccacatatggttcacgcaaccttcaacggcggcctgcagcgccagtgctttctggctacccagcaccagaatcatcacttcttcggcatccagcagtgtaccaacaccgacagtcagggcatattttggcacctgattaacatcgttatcaaagaaacgagagtttgcgacgcgagtgtcatgagtcagggttttgatacgagtacgagaagccagagaagacgccggttcgttaaatgcaatatgaccgtcgttacctacaccgcccataaacagatgaatttttccgtaagaacggattttttcttcatactggcggcactcggcgtcgatatccggggcgttgccgttgagaaggttgatgttttctgctggaatatcaacgtgatcgaagaaattacggtgcataaagctgtagtagctttccggatgctctttcggcagaccgacatattcgtccatgttgaaggtgacaacgtgcttaaagctgacctggcctgctttatgcatttcgactaacgctttataggtggtcatcggcgtgccgccagtcggcaggcccagtacaaacggacgatcggcagtcggtttgaacgcattgatacgattgacgatatggcgagcagcccatttgccgacctgttcagcggtagtcagggggatcagtctcattattcacctcaataagtaaaatgtaagccgttggcggattaggcatctttaagcgtaacctggatttgcgcagacaggcgtcaatccgacctgattttttgaatgataaaataagttttctggtttagccagtaaaagggagtgataataacgatatttggtgacaaaactcacaaaagacacgcgtttaatttgcgatacgaattaaattttcacacactctgtagcagatgatctaacaatctgattacagaacatcggcagtacaatttgcagcaaaataaaaatacggcttgaaacgagccaaatagggttctcgtagggggaataagatgaatattttaggttttttccagcgactcggtagggcgttacagctccctatcgcggtgctgccggtggcggcactgttgctgcgattcggtcagccagatttacttaacgttgcgtttattgcccaggcgggcggtgcgatttttgataacctcgcattaatcttcgccatcggtgtggcatccagctggagcaaagacagcgctggtgcggcggcgctggcgggtgcggtaggttactttgtgttaaccaaagcgatggtgaccatcaacccagaaattaacatgggtgtactggcgggtatcattaccggtctggttggtggcgcagcctataaccgttggtccgatattaaactgccggacttcctgagcttcttcggcggcaaacgctttgtgccgattgccaccggattcttctgcctggtgctggcggccatttttggttacgtctggccgccggtacagcacgctatccatgcaggcggcgagtggatcgtttctgcgggcgcgctgggttccggtatctttggtttcatcaaccgtctgctgatcccaaccggtctgcatcaggtactgaacaccatcgcctggttccagattggtgaattcaccaacgcggcgggtacggttttccacggtgacattaaccgcttctatgccggtgacggcaccgcggggatgttcatgtccggcttcttcccgatcatgatgttcggtctgccgggtgcggcgctggcgatgtacttcgcagcaccgaaagagcgtcgtccgatggttggcggtatgctgctttctgttgctgttactgcgttcctgaccggtgtgactgagccgctggaattcctgttcatgttccttgctccgctgctgtacctcctgcacgcactgctgaccggtatcagcctgtttgtggcaacgctgctgggtatccacgcgggcttctctttctctgcgggggctatcgactacgcgttgatgtataacctgccggccgccagccagaacgtctggatgctgctggtgatgggcgttatcttcttcgctatctacttcgtggtgttcagtttggttatccgcatgttcaacctgaaaacgccgggtcgtgaagataaagaagacgagatcgttactgaagaagccaacagcaacactgaagaaggtctgactcaactggcaaccaactatattgctgcggttggcggcactgacaacctgaaagcgattgacgcctgtatcacccgtctgcgccttacagtggctgactctgcccgcgttaacgatacgatgtgtaaacgtctgggtgcttctggggtagtgaaactgaacaaacagactattcaggtgattgttggcgcgaaagcagaatccatcggcgatgcgatgaagaaagtcgttgcccgtggtccggtagccgctgcgagtgctgaagcaactccggcaactgccgcgcctgtagcaaaaccgcaggctgtaccaaacgcggtatctatcgcggagctggtaagcccgattaccggtgatgtcgtggcactggatcaggttcctgacgaagcattcgccagcaaagcggtgggtgacggtgtggcggtgaaaccgacagataaaatcgtcgtaagtccagccgcagggacaatcgtgaaaatcttcaacaccaaccacgcgttctgcctggaaaccgaaaaaggcgcggagatcgtcgtccatatgggtatcgacaccgtagcgctggaaggtaaaggctttaaacgtctggtggaagagggtgcgcaggtaagcgcagggcaaccgattctggaaatggatctggattacctgaacgctaacgcccgcagcatgattagcccggtggtttgcagcaatatcgacgatttcagtggcttgatcattaaagctcagggccatattgtggcgggtcaaacaccgctgtatgaaatcaaaaagtaatctgctttatgcctgatgcgacgcttgagcgtcgcatccaacaatgacaagcggtggagatcttctctgccgctttttttttcatcaatcatccccataatccttgttagattatcaattttaaaaaactaacagttgtcagcctgtcccgcttataagatcatacgccgttatacgttgtttacgctttgaggaatccacgatgagtgaggcagaagcccgcccgactaactttatccgtcagatcatcgatgaagatctggccagtggtaagcacaccacagtacacacccgtttcccgccggagccgaatggctatctgcatattggccatgcgaaatctatctgcctgaacttcgggatcgcccaggactataaaggccagtgcaacctgcgtttcgacgacactaacccggtaaaagaagatatcgagtatgttgagagcatcaaaaacgacgtagagtggttaggttttcactggtctggtaacgtccgttactcctccgattattttgatcagctccacgcctatgcgatcgaactgatcaataaaggcctggcgtacgttgatgaactgacgccggaacagatccgcgaataccgcggcaccctgacgcaaccgggtaaaaacagcccgtaccgcgaccgcagcgttgaagagaacctggcgctgttcgaaaaaatgcgtgccggtggttttgaagaaggtaaagcctgcctgcgtgcgaaaatcgacatggctagtccgtttatcgtgatgcgcgatccggtgctgtaccgtattaaatttgctgaacaccaccagactggcaacaagtggtgcatctacccgatgtacgacttcacccactgcatcagcgatgccctggaaggtattacgcactctctgtgtacgcttgagttccaggacaaccgtcgtctgtacgactgggtactggacaacatcacgattcctgttcacccgcgccagtatgagttcagccgcctgaatctggaatacaccgtgatgtccaagcgtaagttgaacctgctggtgaccgacaagcacgttgaaggctgggatgacccgcgtatgccgaccatttccggtctgcgtcgtcgtggttacactgcggcttctattcgtgagttctgcaaacgcatcggcgtgaccaagcaggacaacaccattgagatggcgagcctggaatcctgcatccgtgaagatctcaacgaaaatgcgccgcgcgcaatggcggttatcgatccggtgaaactggttatcgaaaactatcagggcgaaggcgaaatggttaccatgccgaaccatccgaacaaaccggaaatgggcagccgtcaggtgccgtttagcggtgagatttggattgatcgcgccgatttccgcgaagaagctaacaagcagtacaaacgtctggtgctgggtaaagaagtgcgtctgcgtaatgcttatgtgattaaggcagaacgcgtcgagaaagatgccgaaggtaatatcaccaccatcttctgtacttatgacgccgataccttaagcaaagatccggcagatggtcgtaaagtcaaaggtgttattcactgggtgagcgcggcacatgcgctgccggttgaaatccgtttgtatgaccgtctgttcagcgtgcctaacccaggtgctgcggatgatttcctgagcgtgattaacccggaaagcctggtgatcaaacagggctttgctgaaccgagcctgaaagatgcggttgcgggtaaagcattccagtttgagcgtgaaggttacttctgcctcgatagccgccattctacggcggaaaaaccggtatttaaccgcaccgttgggctgcgtgatacctgggcgaaagtaggcgagtaattttaagtttcgctatgccggatggggcgtttacgtcgcatccggcaaggaacagacaaacagtttcaaacgctaaattgcctgatgcgctacgcttatcaggcctacatgatctctgcaatatattgagtttgcgtgcttttgtaggccggataaggcgttcacgccgcatccggcaagaaacagcaaacaatccaaaacgccgcgttcagcggcgttttttctgcttttcttcgcgaattaattccgcttcgcaatttatccataaaataaatttaaaataacaaaacataattaaataaaatgtaaccgctttcatcttgctggaatttcacgcttttattcttctgcaagcctttcaaccgcaaacttaagccttgtaacaaaaatcatcaaaatatgtgcggttgctcatgttcttacattctggttacagaaagagattgataattcgcgtcgcgaaaaatagtctgttcctgtagtcagcgagacttttctcaacgctacttttttaatttttattttttcgctgttcacctttggtgcagcaatttatacgtcaaagaggattaacccatgcgtacgtttagtggcaaacgtagtacgctggcgctggctatcgccggtgttacagcaatgagcggctttatggcaatgccggaggctcgcgccgaaggattcatcgacgatagtaccttaaccggcggtatctattactggcagcgtgaacgcgaccgtaaagatgttaccgacggcgacaaatacaaaaccaacctttctcactccacctggaatgccaacctcgattttcagtccggttatgctgctgatatgttcggccttgatattgctgcgtttacggcgattgaaatggcggaaaacggcgacagctcccacccgaacgaaatcgcgtttagtaaaagtaataaagcctatgacgaagactggtccggcgacaaaagcggtataagcctgtataaagctgcggccaaatttaaatacggtccggtttgggcgagggcaggttacattcagccaactggtcaaacgctgttagcgccgcactggagctttatgccaggtacttatcagggggcggaagccggggcgaattttgattacggcgatgctggtgcgttgagtttctcctacatgtggaccaacgaatacaaagcgccgtggcatctggaaatggatgagttttatcagaacgataaaaccaccaaagttgattatctgcactcctttggggcgaaatacgacttcaaaaataacttcgtactggaagcggcatttggtcaggcggaagggtatatcgatcaatattttgccaaagccagctacaaatttgatatcgccggtagcccgttaaccaccagctaccagttctacggtacccgagataaagttgacgatcgcagcgtcaacgacctttatgacggcaccgcctggctgcaagcgttgacctttggttaccgggcggctgacgtagtggatttgcgcctcgaaggcacctgggttaaggctgacggtcagcagggatacttcctgcaacgtatgactccaacctacgcttccagtaacggtcgcctggatatctggtgggataaccgttctgacttcaacgccaacggcgaaaaagcggtcttcttcggtgcgatgtatgacctgaaaaactggaatcttccaggcttcgccatcggcgcttcctacgtttacgcatgggatgctaaacctgcgacctggcagagcaatccggatgcgtactacgacaaaaaccggactattgaagagtctgcctacagcctggatgcggtctataccattcaggacggtcgcgccaaaggcacgatgttcaaactgcatttcaccgaatacgacaaccactccgacatcccaagctggggcggtggttacggcaacatcttccaggatgagcgtgacgtgaaatttatggtaatcgcaccattcaccatcttctgatgcccgacgcggcaggttttgtgcctgccgcacgtttgaggaatttgctatgaaaaaactgattctcatcgccataatggcaagcgggctggtagcttgtgcgcaaagtaccgcgccacaggaagacagtcgtctgaaagaggcatacagcgcctgtatcaacaccgcacaaggtagcccagaaaaaattgaagcctgccagagcgtgttaaacgtgctgaagaaagagaaacaacatcagcagtttgccgaccaggaaagtgtacgcgtactggattatcagcagtgtctgcgtgcaacgcaaaccggaaatgatcaggcggtgaaagccgattgtgataaagtctggcaggaaatacgcagtaataacaaataagtgagagctgtaactctcgcttttcttatttcccttgcataaaaaagccaacccgcaggttggcttttctcgttcaggctggcttatttgccttcgtgcgcatgttcatcttcgcggcaatcgccttcggcacagtgaccgtaaagatagagactgtggttagtcaggcgaatgccatgttttgcggcaatttcacgctgacgcgcttcgatggaatcatcactaaattcgataaccttgccgcagtcgaggcagatcaggtgatcgtggtgatgttgctgtgtcagttcaaatacggatttaccgccttcaaaattgtggcgggtgacgataccagcgtcgtcaaactggttcagtacgcgatataccgtagccagaccaatttcttcacccatatcgatcagacgtttgtataaatcttccgcactgacgtgatggttgtccggctcctgaagaacttccaggatttttaaacgaggaagcgttactttcaggccagctttctttagggcggtattgttatcagtcatgcggaatctgtcctgttactaagcggttcacttcattagaagaagtgacagaatttgctcttgagataatgcgtatcattatagaattgccacgcctaaatgaaaaccacaagtccctggcaaatattgttaataaaaacgtggcacagcttacatttacaacggcaaggccacttgaacaccgggacattgtacaggtacaacagcaaaagttacaaatttgtagcaattattttgattggcattatctattaatacggcgtagacatgagtctacgccgcatcacatcaggcattgagaatttcgtcgagatgcaactcttcagaaatctgtttaacccatttttctacacgttcagcggtcagttccggctgacggtcttcgtcgatagccagaccgacaaagtggtcgtcatctgccagacctttacttgcttcgaaatgatagcccgcagttggccagtgaccaacgatggttgcaccgcgcggttcaatgatgtcgcggatggtgcccaatgcgtcgcagaaatattcggcgtaatcttcctggtcaccacaaccaaacagcgcaaccagtttgccgttgaaatcaatctcttcgagagtcgggaagaagtcatcccagtcacactgcgcttcgccgtaataccaggttgggatgcccagcagcagaatgtcataagcttccagatcttctttgctgctttttgcaatgtcatggacatcggcaacgtctttaccaagctgtttttgaatcatttttgcgatattttcggtattaccggtgtcgctgccgaaaaagatgccagtgatagccatgagtgaaataacctcttgaaacttattgaaatgggggtggaaaattgcccacggataaaggcaatcatagcagaacaggcagtcttgcggaatcagcaaacgagcaggactgcacactgtgctacatgaaagtggaaatttaaacgatgccctgactacgcagcgccgccagttgctgcattaacatctcttcgatcagttcgctacggctcatattgcggctctccgccagctcgttcagcgcctcgacagcttccgcgttcagcttcagttcgacacgcttaaggccacgtactttgtcgcgttttagctggttgcgtttattaatacgcagctgttcatcgcggctaagcggattagttttcggtcgtcccggtcgacgctcgtgcgcgaacagatctaatgtcgtacggtccgtttgttctttggccatgatcttggtgacttcgggggaaacaatcagccaggcctctgcccggatggatagcgcgccataatacatcagcgcgatgagtcacgccaacgcccacgcgcggaaagcgacgcggacgctgggtttttaatcagttgcgttaatcattgagatagcgacggatagcgcgtaataccgcatccggtttttcagcatggacccagtgacccgcgcctgcaatcacatgcgcccgtgcctgtggaaattgagccagtaaatcatcacggtactgctcgctaacatacggagaattgccgccagggataaacagggcagggtgatcccatgccgggattttctcccaacctacaatatgcggatactgatcccacaataccggcacgttaaagcgccactccccgtcaacaaaagatttcagcagaaactgaatcaccccttcttcattaagatgctggcgcattattgctgctgcttgctggcgagtttgtgcgtcgctttcactgaccgcgttgatagccgcaaaaatctcatcatgacggcgtacgtgatagtcgaccggcgcgatatcgatcgccaccagtttatcgatgcgatcggaggctagtgcagtaagtgccattaccgctttaccgcccatggagtgaccgataaatgttgctttgtcgatctgctgtgcatccagagtatcaacaagatcctgcgccatcgccgggtaattcattaccggatctctcggactaagaccgtggttacgcatatcaacctggatgatattgtgatcgtttaccagatcgcgagccagtacgccaaggttgtcgaggctgccaaacagaccgtggacaagaacgatgggagaattattgtgctggttttgtgcagtttgcgcgcggatattcaatttcatggcaaagttctttttttcgcgttgtcgggttagggtattatgttgaccattgtgccacagggctgcaacaaataaggtttattccgagtttttctgcaagccaggcttgacgctatccgctgccgggatttattcatatactcctggcgacttgtattcagctaagacactgcactggattaagatgaaaacgattgaagttgatgatgaactctacagctatattgccagccacactaagcatatcggcgagagcgcatccgacattttacggcgtatgttgaaattttccgccgcaagtcagcctgctgctccggtgacgaaagaggttcgcgttgcgagtcctgctatcgtcgaagcgaagccggtcaaaacgattaaagacaaggttcgcgcaatgcgtgaacttctgcttagcgatgaatacgcagagcaaaagcgagcggtcaatcgctttatgctgctgttgtctacactatattctcttgacgcccaggcgtttgccgaagcaacggaaagcttgcacggtcgtacacgcgtttactttgcggcagatgaacaaacgctgctgaaaaatggtaatcagaccaagccgaaacatgtgccaggcacgccgtattgggtgatcaccaacaccaacaccggccgtaaatgcagcatgatcgaacacatcatgcagagcatgcaattcccggcggaattgattgagaaggtttgcggaactatctaaaacgttgcagacaaaggacaaagcaatggcaatccacaatcgtgcaggccaacctgcacaacagagtgatttgattaacgtcgcccaactgacggcgcaatattatgtactgaaaccagaagcagggaatgcggagcacgcggtgaaattcggtacttccggtcaccgtggcagtgcagcgcgccacagctttaacgagccgcacattctggcgatcgctcaggcaattgctgaagaacgtgcgaaaaacggcatcactggcccttgctatgtgggtaaagatactcacgccctgtccgaacctgcattcatttccgttctggaagtgctggcagcgaacggcgttgatgtcattgtgcaggaaaacaatggcttcaccccgacgcctgccgtttccaatgccatcctggttcacaataaaaaaggtggcccgctggcagacggtatcgtgattacaccgtcccataacccgccggaagatggtggaatcaaatacaatccgccaaatggtggcccggctgataccaacgtcactaaagtggtggaagacagggccaacgcactgctggccgatggcctgaaaggcgtgaagcgtatctccctcgacgaagcgatggcatccggtcatgtgaaagagcaggatctggtgcagccgttcgtggaaggtctggccgatatcgttgatatggccgcgattcagaaagcgggcctgacgctgggcgttgatccgctgggcggttccggtatcgaatactggaagcgtattggcgagtattacaacctcaacctgactatcgttaacgatcaggtcgatcaaaccttccgctttatgcaccttgataaagacggcgcgatccgtatggactgctcctccgagtgtgcgatggcgggcctgctggcactgcgtgataagttcgatctggcgtttgctaacgacccggattatgaccgtcacggtatcgtcactccggcaggtttgatgaatccgaaccactacctggcggtggcaatcaattacctgttccagcatcgtccgcagtggggcaaagatgttgccgtcggtaaaacgctggttagttctgcgatgatcgaccgtgtggtcaacgacttgggccgtaaactggtagaagtcccggtaggtttcaaatggtttgtcgatggtctgttcgacggcagcttcggctttggcggcgaagagagtgcaggggcttccttcctgcgtttcgacggcacgccgtggtccaccgacaaagacggcatcatcatgtgtctgctggcggcggaaatcaccgctgtcaccggtaagaacccgcaggaacactacaacgaactggcaaaacgctttggtgcgccgagctacaaccgtttgcaggcagctgcgacttccgcacaaaaagcggcgctgtctaagctgtctccggaaatggtgagcgccagcaccctggcaggtgacccgatcaccgcgcgcctgactgctgctccgggcaacggtgcttctattggcggtctgaaagtgatgactgacaacggctggttcgccgcgcgtccgagtggcacggaagacgcatataagatctactgcgaaagcttcctcggtgaagaacatcgcaagcagattgagaaagaagcggttgagattgttagcgaagttctgaaaaacgcgtaaacacatttaataaaaaaagggcggtcgcaagatcgcccttttttacgtatgacaaacacagaattgcctgatgcgctacgcttatcaggcctacgaggatggtgcaatatattgaatttaagcgattttgtaggccggataaggcgttcacgccgcatccggcaaaaacaacgaacactttgtcaacaaactgagtagctcaaggaaatcccaatgaagaccaacaggagtctggtcgtcatagtgagtctaattaccgccacattactgctgactgcatgcgcccaacctgaacaaagtagtttagctggcgactggttactgacccctaaagataaaaccagaggattaacgggtagcattgcggtaaatattgcacctttccggtgtaagacaaattgccgtggtgataacttacctgataatacccgccgctggcagttgagtggcgggaacgaaaaagaacttacttatcttcataatatgagtgcacaagaaaaggtcggtttaaatcccggttggcaatgctacaccagtttttttatgcgggtttgccagggcaagcccggcactcgaccgatagtcaatgaggattatgtcagcgaaagcggattttttggcagcatgatgcatgtcgggattattgagttacgacgctgccagagtgaaaattgccagcaagaattgaaagcgataaatacacattaaaatagtgagtccgggaatgaaacccggacctgaacatgtcttattgcgtgaatgtttctttcatttgatactgcatttcccagagttcagtaaggctaataacttttcttgttcttgcttcttcactttgtacccataagaaagggtagaacgtgaaggcttccgttgcgcttaattttattacgtcttctcgccattgctgccatcgtacattttcatagaaggtatctaaatcaccggataatgcccactgaagaaactcagaatatccaacttccagactttcccaattcagcgtatctggcgcaaaataataaacgcagccagtatcttccccaagatcgccaccattaagagcaaaaattacccctgcgacatcgtcagcgatgggtaaagcccgcacgcctgcgaattcagggcgttgtgtccaacttactggatctcgtggcaaccgggggtgaccagatcctgctatgcgtaattaaccattatcaatcagcagacctccggagccatagacaagcgcacccatcggactttttgttgtcacctgtaattgataaagtgcggtttcggctaaatctttattaaccggtaagagttcggtatggtttgtggcgtcttttaaccagttctggattattggccaggcactatcttcagtatttactaactgattcatttcacgcatcgctacttgctccttgtgtgctacggtgtcatttatgatgaggaattgtatggaacattttttaaatattaagttccttatatttgaataaaaaatgactttatccatacattgccacttttttcaaagcataaaccgatacccaataccggtttcagtaataaaatggcgaggccgggccggatcctgttccagtttttgtcgcagatgccccatataattacgcaaatagttgctgtgttcgatcgcgtttagaccctacatctgccggatgcggcataaataacgaactatttgccaacaaacagaaagggcgatcattcaatcgcccttttttactttgttttattaaccgtgtttatttttcagttcaaagcgtggacttaccagaccatacagtgtccaaccaaggaaggtcacgatggaaccgtacagcatggcttcttccccggaactgtacagcgcataaaagctatacatcgcgccaacaaaagcaacaaagtttgcaactttcgctttactggggggcacattagcgaccttctgaataatgactaatgccgccatactcagaatatacggaatgatattggtcaccacggccaggttaaccagcacgttgaactgactgtttaggctcgggctaatggtcatcagtgccaatccactctgaataatcacaatggtcaacattccctgcaccggtgcatccactttggttacacgggagaaaattttagggaagtagccttcatcagaactagatttaaacacctgggcaatggtgaactgccagccaagtaggctaccgcagcaggacatcaccatcagcgccataatgactttacccacttccggcgtgaacatctgcgcgaaggccagaccaaatggtgccgtactatttgccagctccatatttggcacaatcccggcaatcacgttggtggagacgatataaatcaccgccgcacctaacgtaccgccgagtaccgcgattggcacattacgttccgggttttccactacatcagtattcgcacacgcagactccagaccaagaaaagcccacagcgtcatagcgatggaagaacctaccgcactgaagaacggtgcatgatgcggattccaggaatcaacgtacagcgtcgggctaaaccagaaccagccaataatgcacagaccgacgaccggaataatgaccccccacacggtaatgctactgatttgcccggtaatgcgcgcaccaccaaagttagccacggtacaaatccacagcaccccgatggtcgcaagaccaatctgcactgggctcaaactcgcgccgagcagttcggtgccgtaaccaaccgcgctaatagcaatcgcgacgttagcaatcagcagactgacgccgtaggtatagttcgccataaagttaccggatttaccgaaagcatactcggcataaccgcccataccgccacttttacggctgaacataccgcattttgcgaatgcccatgccagtgccatactgcctacggctgtcaccagccaggagataatactgattgtcccgacttcggcaagctttgtcggcagcatgatgataccggagcccatcatgttgaccatcgtcagtatggttaactgaacgacgcccattttgttgcttttagcctgactcataatttttcccctttcaacagggtgctttgcgcatcacgaggcttgatgacatagcaccaaacttgcttacgaccatcatgttcttcgatatagacaccctgcagctccggtgcaaaacctggcagcaggttgatcccttcttccagagcgctgaagtaacgcagaacagcaccaccccagatttcacccggaacaacacacagcacacccggaggataaggaagcgcaccttcggcagcgatacggccttctgcatccggcagacgaaccagttccacttcaccgcgtaaataggcgtagttggcttcttgcggattcatgctgacgcgtgggaagtgctccttacggaacatctctttttgcagttgtttcacgttgtggcgggcatacaaatcatgcatttcctgacacaactgacgcagggtataaccggcgtagcgctcttcatgctgtttgtagatggaaggtagcacttctgctaatggcgcgtcggactcaagcagtttttcgaagcgtaccagcagggcaacaagttgctgaagtttggccatatcttctgccggagtcagcaggaagaggatggagttaagatcgcatttttccggcactacgccattttcgcgcaggaagttagcaagaatcgtcgcgggtacaccgaacgcttcatattcgccgttacgtgcatcaatacctggggttgtcagcaacagtttgcatggatcgacaaagtattgattctctgcatagccttcaaaagaatgccagtgttcccctggtacaaactggaagaagcgcagatcaaccgcaatttgcgctgtttcatagctctgccagggtttaccatccaccagttcaggtacgaacggacgaatatgctgacagttatcgaggatcagtttgcgggcattaatgccatttaccacacaatccatccacatattacgaccgctgacaccttcatgcattttggcgttgatattcagtgcggcaaacagcggatagaacgggctggtggaggcgtgcatcataaaggcgttgttcatgcgtttgtgcggtacataacgctgttgccctttgatgtggctgtcttttttatgaatttgactagtctgagaaaaaccagcctgttgtttatgcacagattgcgtaaccagaatacccggatcgttctcattaagatccagcaacagcgggctacagtccgccatcatcggaataaactgttcatagccgacccatgcactgtcaaacaggatgtagtcacacagatgaccaattttatccaccacttggcgggcgttataaatcgtaccgtcgtaggtgcctaactgaatcacagcgaggcggaaaggacgagcctcttttgcccgctgcggtgcgacttccgcgatcagctcacgcaggtaactttcttcaaaacagtgcgcatcaatgccaccgataaagccatacgggttacgtgccgtttccagataaaccggtgttgcaccagcctgtagcaacgctccgtggtggttagatttgtggttattgcgatcaaacagcaccagatcacccggtgttagcagggcgtttaaaaccactttgttagaagaactagtgccatttaaaacgaagtaggttttatcggcattaaacacttttgccgcatgttgctgtgcaatgcatggcgcgccttcgtgaatcagcagatcgcccatcgctacgtcggcgttgcacaagtcggcacggaacagcgcctcaccaaagtattccacaaactgattccccgccggatggcgacggaaaaattcgccgccctgatgaccagggcaatcaaacgcgctgttaccttgattgacataatcgaccagtgcgcggaagaaaggtgggcgcagttgagtttcataatggctggcagcggtttctaactggcgaccataaaattctcgtcggctttcgcaattctcaaagacaccgctaatacggggcaaatactctgcgggtacacgttcttgattttcagtagcaataaataccgggatgccataacccgtggcatcgatttcatcgagttttccgcatgtaacatcgttgaggcttaaaactattgccgccacatcgatattacgactttcattaatgtagatacattctcgctgcgtggtaaaacagtccgggcaagaatcactaaccgcaatttttaatttactcatttttcatctctttattttaggtaatagcaggtcctcaatttctcgaatgagaaatcgatcgtgccggaaaaaagcaaagttaccccgctgataaataaatcaggtagattgcttttttcagaatgcagaaacccttaccagtcaggtggctgataatacaagggttaacagagaatgagcactgcggaatacaggcatatgcctgtaatacagagagtcaggaagacctgtacgctgaagtgcccttagtcggtagactaacgggcattgaagaagtgaaagtcgaagctattgcgatgagcaaacttcataatatgagttgtccgccttatatggggcatagtgcggctgttattttccatttaatttacctttcctgatgtgaatgaaggtgaagatattctatccaggaaatacggttgaactgtgaaggtgatcaataaaaaatgatcaatcttaatttatttaatgatgagctttttactcagtaatataaaatattgaattgttatttttgtgtgttgtttaagataaaaagccgtatttattattacggctttaattaataaaaggcaggctgtattaaaattaatattcaaagcataaaccgatagccaataccggtttcagtaatgaaatggcgtgggcgggcgggatcctgttccagtttttgtcgcagatgtcccatataaatacgcaaatagtgactgtgttcgaccgcgtttggcccccacacctggttaaggagctggcgctgggtgagtacttttccggcattgttgagcagcaccgccagcaggcggaactcaattggtgtgagatgcacctcttcctcaccccggtgaatcacgcgggcggctaaatcgacggtaacatcggaaaattttaccagcggatcgggcgcggtggtggcagagtggcggcgtaatgcgacgcgcagacgggcctgcaattcgccaatgccaaacggcttactcagataatcatccgctccggcatccagcgcggcgattttgtcgctctcttcgctgcgtgcggaaagcacaatcaccggcaccgcgctccactggcgcaggtcgcggataaactcaatcccatcaccatcgggcaggccgagatcgagaataatcaaatctggcttacgggttgccgcttccagcaagccgcgttgcagcgtttcggcctcaaagacgcgcatcccgtcgccctccagcgccgtgcgcagaaagcgacgaatagcctgttcatcttcaacaatcagaacgtttgtcacatatcctcatgaaattcttcaagttcaggggcagtttgctggggaagtgtaacacgaaaacaggcaccaccttccggtcggttgaacgcggtaatagtgcccccgtgtacatccactatcgcccgacaaattgccagtccaagccctacccccggtactgcgctctctttattcccgcgagcaaacttatcaaatatcgtctgctcctggcctggcggaagaccggggccgttatcccagacatccagttgtagattttcgccctcaacgtgggcatcgataccaatttcggcctgcgcacccgcatatttcaccgcgttctccagcagattaatcagcacccgttcaaagagtggcccgtcaacgtggattaaggtcagcggttctggcagagaaagattgatggggctgcttaaacccggttccagcatttgcagcgcgctgccgactacttcttccagcgttaaccactctttcttcaaattaaagccgccggactgaattcgcgccatatccagtagattattcaccagtcgggtagtgttcagcacatgctgacggatctcgctggcctggcgggcgtggggacttccttcgcttgccagatcgagcgttaagatttctgcctgaccaaacagcaccgtaagcggcgtgcgtaaatcatggctaagcgccgccagcagggcgttgcggatctgttcacgttcgcttgccatccgcgcctgttcttcgctggcggttagcgtcagccgctcaagggcattggcgactaacagcgtaaacgtctccagcaggcgctgctgttccgggatcatcaactggcgcagattccccggctccaccaccaccagcccgtaggttttctcgccgctttttagcggcaaaatctggtacggtacaccgggtaacgtgtcggtgcccgcgcccgcaggcaggcctttatcaaaactccactgcgcgatggcatcgtcccacggcgtcattccttgcggatgtgttaacggctgcaatttaccgttgtcatcgggcaacaacacctgactgcgggcatgaaacgtggaggcaataaattgttcgctggtggcagcgatatcctgcggactgcggcccaccgccagagctttgctcatttcatataagtgccgtgtgcgttgctcgcggtaacgggctacccgcgcctgataacgcacgccagcagtaaggttcccgatcaccagcccgacggttaacatcaccgcgaaggtcagcagatattgcacatcagagacggcgagcgtgccgcgtggggcgataaaaaagagatcgaaactcactacattaatgacggtggcaaccacactaggccagcgtccataaaatagcgccaccaccaccacgccaagcagatacagcatcaccaggttggcggcatcaaacgccatcagccactgcatggcaattaaggtgataacggcgcataacgcggcggcaaccacgcatccctgaatttgtacacgccacttgtctttaaaagagcggttatccggcgcgttgttaatcgtgcgggcgggtggttcatcaagcgcgaccagcacctgatcgagatcgggggcgatgcgcgccagtcggtcagcaaacgtttcccgacgccaccagcggcggctggccgggcgaccgagaataatcttgccgagattatgttcacgggcataacgcactaccgctttctcttccgctggatcagaaagtgttgccgtctccgcgcccagttcctgcgccagacgtaaggcgctgagaattgcccgacgttttttttccggtaagcggtgcagggcaggggtttcaacatacaccgcgtgccagacgctacccagccgactcgccagccgcgccgctgcgcggaccagtttttcgctgccggtgttatggccgatgcataaaaggatcgcgtcgcgcgtgcgccacactttctcttcgccaggatgcccccgccaggcgcgcatttgctcatcaacgcgatcggcagtacggcgcagtgccagttcgcgcagggcgatcagattacctttgcggaaaaaatgttcaatggcgcgctccgcctgcccggcaatatagactttgccttctttcagccgctggcgcagatcgtccgggggcaagtccaccagcaccacgtcgtcggcggcatcgaaaaaaggatcgggcacggtttcccgtacctgaattccggtgacgccgctgaccacatcattcagactttccagatgctgaacgttgacggtagtgaaaacatcaatgccagcttccagcagttcttcgatatcctgccagcgtttgggatgacgggaacctggcgcattactgtgcgccagttcgtccattaagatcagcgccgggcggcgggcgagggcggcatcgagatcaaactcgctgatatgccgcccacggtacgcctggcgttttaacggcagaacagccagcccttccagcatggcggcggtatcttttcgcccgtgggtttctaccacgccaaccacaatatccagcccttgcgcccgcagtcgctgggcttctgccagcatcgcccaggtcttcccgacgcctgcacaggcaccgaagaaaactttcagcttcccccgatgcggcgcggcagtttgttccagcagacgatcggggtcgggacgtaagggttcgttattcatcaagtttatccagcgccagattgagttcaacaatgttgacaaccggctggccgatatatttcaccagcggttgttggctgtattttgcgatcagttgcgtgagctgttcaacgctgagattacgcgctttcgccacgcgtgggatttgccaggccgccgcttgcggggtgatattattgtccagcccgcttgcgcttgccgtcaccagttcaaccggaacgctcgcgctggcatccgggttagcggcccgtaatgcagcaacgcgtgcggctattagtttatccagctcagggttactgaccgccagattgctcccgccagaagcctgtggattatagggcatttctgccgttgcgctcgggcgaccatgaaaatagccgttgccggtaaaattctgcccgattaatgcgctaccgcgcaccgtatcaccttcacgaatcaagctaccattggcctgccagggaaaccaccattgccccagtacggtggtcagcagcgggtaaacgccgccagtaatcaataacagaaagataaatgtacttaatgccggacgtaatccactcatggtaaacctcacaccagaccgcaaacggtcagcagtaaatcaatgactttgataccgataaacggcaccagcagcccacccagaccgtaaatccataagttacggcgcaacatggcagaagcggtaagcggtttataactcacgccttttaacgccaggggaatcaaaaagacgataatcaaggcgttgaaaatcaccgcactgaggattgcggagtcggggctatgcaggcacatgatgttcagcgcatttaactgcggatacgttgccgcgaatgccgccggaataatggcgaagtatttcgccacatcgttggcaatgctgaaggtggtcaggctgccacgggtcatcagcatctgtttgccaatgtgcaccacctcgatcaacttggtcgggttagagtcgagatcgaccatattgcccgcctctttcgccgcctgggtgccggagttcatcgccaccgcgacatctgcctgcgccagcgccggagcatcgttggtgccgtcgccggtcatcgctaccaaacgaccttccgcctgatactgacggatcaatgccagcttggcctccggtgtcgcttcggcgagaaaatcatcgacacccgcttccgcagcaatcgcggcggcagtcagacggttatcgccggtaatcatcaccgttttaatgcccattttgcgcagctgggcgaagcgctctttaataccgcctttgacgatatctttcagcgcaataacgcccagcacacgagaaccttccaccaccaccagcggcgtggctccctgacgcgcaacctgatcgactttttgatcaacatcggtagggaagtgaccaccgttagcctcaacatggcgacgaatggcatcgacagaacctttacggatcatgcggttgtcgatgttgatcccgctcatccggctttgcgcagtaaacggtacaaaggtggcatggaggctctgcacatcgcgctcgcgcaggttaaaacgctgcttggcgaggatcacaatactgcggccttccggcgtttcatcagccaggctagccagttgtgcggcgtcagccagcgttttttcatccacgccctgcgcggggataaactcgctcgcctgacggttaccgagtgtgatggtgccggttttatccagtagcagaacgtcaacgtcacctgccgcttcaactgcacgtccgctggtggcaatcacattcgcgcctagcatccggctcatcccggcgacgccgatcgcactcaacaggccgccaatagtggttgggatcagacagaccagcagcgccaccagtaccgttacgctgactgcattaccgccccacgcggaaaacggccacagcgtggcggttgccagtaaaaagacgatagtcagggcaatcagcagaatggtcagggcaatttcgttcggcgttttgcgtcgctgtgcgccttccaccatcgcgatcatccgatccagaaatgtctcgccggggttaacgctacactcaatcaccagccagtcagaaagaatacgcgtgccgccggtgacggaggcaaaatcgccgccggattcacggatcaccggtgcgctttccccggtgatggcgctttcatcgacgcttgcacccccttcaataacttcaccatcgcaggggataatatcgccagcttctaccagtacgatatcgcctttacgaagttggtcggcaggaactttgtccgccgcagcgccatatttcggctcacgcagcttgcgggcaaaggcagtttttttcacccctttcagactgttggcctgcgctttactgcggccttctgccagcgcctcggcgaaattagcgaacagtacggtgatccacagccaaccgctaatggccgcgctaaacagcgcattgccgggcatcgcaccgcttgccatcgcgatgctaatacaggtggtcagcagactgccgatccagacgataaacatcaccggattgcgccattgcgcctgcgggtttaattttttcaccgcttctttcagcgcctgaacgacaagtgttggttcgaatagcgccagttgtttacgactcatattcagtgctcactcaatatcatcaggagagatattccgccaccggaccaagcgccagggcagggataaaggtcagtgcgccaaccagcaacacggtgccgattaacaggccaacaaacagcgggccgtgcgttggcagcgtgccggagctggcggcttggctctttttactcaccaggctaccggcaattgccatcaccgggataatcaccccgaagcgaccgacaaacatgcagaacgccagtaaacagttccagaacggagagttggcgcttaatccggcaaaggcgctgccgttgttgttagcggcggaactcacggcgtacagcacttcgctaaaaccatgcgggccagggttgagcatggcgctacgtccggcgtcggtcatcatcgccaacgccgcgcccatcagcaccagcgtcggggtaaccagaattgccagtgcagtcagtttcatctcgcgtacgtcgatttttttacccagatattccggtgtacgaccaatcatcagcccggcaataaacaccgccagcaggacaaacagcatcatgccgtaaagaccagaaccgacaccgccgaacaccacttcaccaatttgcatcagccacatcggcaccatgccaccgagagcggtaaagctatcatgcatcgcaatcaccgcgccacaggaagccgccgtcgtcacgaccgcaaacaggctactgaccagcacgccgaaacggctctctttaccttccatattgatgctgctgtccgtgcccagtgccagcagatgaggattaccctgaacttctgcccacatcaccacgcctacgcagatgacaaaaatcacactcatcgcccacagcaacatgcgcccctggcggcgatcgcccatcacttcaccaaaggcaaagcacagcgccgttgggatcaagaagatcgccagcatctgcacgaagttggtcagtgcggttgggttttcaaacggatggctgctgttggcattaaagaagccaccgccgttagtaccgagcatcttgatcgcttcctgagaagctacaggccccatgggtaacagctgttgcgctccttcaacggtattcacagcctgataaggcagaaagttttgcagcgcaccttgttgaataaaaaacagtgcaatcaacaacgccacagggactagcacccataacgtgatgcgtagcagatcgacccaggcattcccgagcgtgctcatgctctggcgggtaaacgcacggatgagggcaaaaatcaccgcaatcccgctggcggcagaaagaaagttttgcaccgttaagcccgccatctggctgaaatagctcaacgtggtttcaccgctataagattgccagttggtattggtgacaaagctgacggcggtattcagcgccagatcccagctcagccctggcaactgctgtggattaagcggcagatagtgctgaccgagcaacataaaaaacagcaccgccagccccagcatgttcaggccgagaatggcacaaagatattgcttccagttcatctcacggtcagagacgccaagtgcgcgaaaaagtacgcgctcaacgcccgttgtaccgggaagaggaatgtcattaatcagccgcgccagcccgctgcctaaaggacgcgccagcaccattaacaccagtaaaaacgtggcgatcagtaagaacccttgcgcagccatcagaacgcctccgcattgatcagggcataaaccagataacccagtaataaaaacaccagcaatacgccggttatcacgcctgcactcacagtgcacctccagtggcctaaaagtgataccggaagggtagaattctggctgcaaagatttcgcaaaaatctgcgggcggggtgtaaaaaaagtataaaaatggcaaaagccatgatttaactaatgtttagtattaatttaacttttgtgtaacttaattacaggatgaatgtaaataaaccatcaataagcaaaaataagtggtcggatgagtagtaaaattacacaaaaggcggtactattttcatcagataaacaaattcatttttccggtgccattcaccgggtagatacaaaagggggagaaaagtatggaactctacagagaatatcctgcatggcttatctttttacgccgtacttatgcggttgcagcgggcgttctggcgctgcctttcatgcttttctggaaagaccgcgcccgcttttacagctacctgcatcgcgtctggagcaaaaccagcgataaaccggtgtggatggatcaggccgaaaaggcaactggtgatttttattgattgctgagttttgaatacattgaacgtctacacttactcctgtaaaccgctcaggagcagtaatgaatctacaacgatttgatgacagcaccctaatccgtatctttgcccttcatgagttacatcgactgaaagaacatggcttaacgcgcggggcgcttctcgattatcacagccgctataaactcgtctttctggcgcattctcagccggagtaccgcaaacttggcccgttcgtggctgatattcaccagtggcaaaatctggatgactattacaaccagtaccgccaacgcgtagttgttttgctttctcaccccgccaacccgcgcgatcacaccaatgttttgatgcacgttcagggttattttcgcccgcatattgattccacagaacgccagcagctggctgcgcttatcgacagttatcgccgtggcgagcaaccacttcttgcgccgctgatgcgtatcaaacactatatggcgctttatcctgacgcctggcttagtgggcagcgttatttcgaactttggccgcgtgtgattaacttgcgccatagtggagttttatgactacccatctggtctggtttcgccaggatttacgtctgcacgataatctcgcactggctgccgcctgccgcaatagctctgcacgcgtgctggcgttgtatatcgctacaccacgccagtgggcgacgcataacatgagcccgcgtcaggctgaacttatcaatgctcaactgaatgggctacaaatagcgcttgcggaaaaaggtattcctttattgttccgtgaagtggatgactttgtcgccagtgtcgaaatagttaaacaggtgtgcgcggaaaacagcgttacccacctgttttataactatcagtatgaagtgaatgagcgggcgcgggatgtggaagttgaaagagcgctgcgtaacgtggtgtgtgaaggatttgatgacagcgtgatcctgccgcctggcgcggtgatgaccggtaatcacgagatgtacaaagtctttacgccttttaagaatgcctggctgaaacggctgcgggaagggatgccggagtgcgtcgctgcgccaaaagttcgtagtagcggaagcatagagcccagcccatccattacgctgaattatcctcgtcagtctttcgatactgcgcattttccggtggaagaaaaagcggcgattgcgcaattacgccagttttgccagaacggtgccggagaatatgagcaacaacgagattttccggcagtggaaggcaccagccgtttgagcgccagcctggcaacgggcgggttaagccctcgccagtgcttgcatcgcttgttggctgaacagccgcaggcgctggacggtggggccggtagtgtctggcttaatgagctgatctggcgcgagttttaccgtcacctgataacgtatcaccccagcttgtgtaaacatcgtccatttattgcctggacggatcgtgtacagtggcagagcaatcccgcacatttacaggcctggcaggaaggcaaaacgggatacccgattgttgatgccgctatgcgtcagcttaacagcactggctggatgcataacaggctacggatgattacagccagttttctggtgaaagatttattgatcgactggcgcgaaggcgagcgatatttcatgagccagctgattgatggtgatttggcagccaataacggtggctggcagtgggccgctagtaccggaaccgatgcagcgccgtattttcgtattttcaacccgacaacccagggcgagaaatttgatcatgagggcgagtttatccgccagtggctaccggaactgcgcgatgtgccagggaaagtggtgcatgagccgtggaagtgggcgcagaaagcaggtgtgacgctggattatccgcaaccgatagtcgagcacaaagaagcgagagtacaaacgttggcagcgtatgaggcggcgcggaaggggaaataacagacgcgtcaggcaatcgagcccagatgccggatgcggcgtgaacgccttatccagcctacaaatttgtgcaaattcaataaattgcaggaaatacgtaggcctgataagacgcgtcaagcgtcgcatcaggcatcggtgctggcctattaagactccagcgccagcgcgcggtttctgaatttcagcgcctgatacagccaaatcatcagtaccagtcctacacacgccagtgcgccccaggtaatttgatcaaatacttcaatatatgcattgatggagtagttgatcgccccggaagcatcaaagctagcctggcttgtctgatcggcaatcacgcccgccagatagttcgcgatcgcgccagaaagcagcatgtagatgccggttaatacgccggtcacaccggggatttcaatgcgcgtaatttggctcatggcaaccgggtcgataaacagttccgcaaagcccatcaccgccaggcctaataccatcagtggcagagaagagtgaccatacattgcggaccagcgggcgcttaaggtcagaatgcagaatccggcgctcatcaggccaaggccaagagcaaatttcccccagatgcgcacggtacgattacccgcgacactctcttttaccacccacgccaggaacacaccgcacagcataactgcgaaggcattaatgctctggaacatcgcggtcggaacggtataaccaaacatatcgcggttaacgaagcggtcgatataaaggctaatgctgctaccgccctgttgtgcgaaggcccagaacaacatactgaagaaggtgagcgtcacaatcagccccagctccttccgctgtttctggttttctgctttgcgataaatttttgccagtacacccaggccaataatagtcgcgacaattaaggcgtatacgctccactctttccagaacagtatggtaatcagtgcaggcgttgccaccagcagaaccagcagccatccccagttcggcaggagaaagtttgtcgcacgcagtacttttttgttaacgccgcgggtatgagtgaaatgacgattgccacataagaaaatgaccagacccgcgatcatgccaaccgccgccaggccaaagcccatcgcccagctgtactcttcctgggcgtaaccacaggcgataggtgcgataatagaccccacgttacccgccgcatacatcaggctgaaaccgccatcacgacgcggatcggttggctcatacagctcgccgagcagacagcttacgttagatttaaacaggccatagccgcagacgataatcgccagggacagatagaggaaactcggatggatctcactggcacccagcaccacatgaccgatcgccatcaacaacgcccccagcatcaccgccatgcgattgccgagaactttatccgccaaaaagccaccgaggattggcgtgacatacaccaggctacagtaggcgctaaataactcgtaggcgtgagtatcgttgtattttagttgattggtgagatagagaatcagcagggcacgcatgccgtaaaagctaaaatattcccagatttgcagcgcaacgacatagtaaatagcgcgcggctgacttgcgtgtttattcataataattccacaattgacggcaacgtcacgtaatagttgcgcggcgtgcttgtgtttccttaaagttaaaactttgatacagatctgattatttatgcaatatgctgtctgattgcataaatatacattagctgaagcgtgatgatataaacaatttgcgtcttttggcgtcgggtttgtttcttaatatgtcaaaagattggctatcgacgaactggcgaggtaacgctatgttaacggtgtagctatcagaatacggaaggcgcgaagatgaaaaacaccgaactggaacaactgattaacgaaaaactgaacagcgcggcgattagtgattacgcgccgaatggtttgcaggtggaaggcaaagagacggtgcaaaaaattgttaccggtgtcaccgccagccaggctttgctcgatgaggcagtgcgtctgggcgcggatgcggtcattgtgcatcatggctacttctggaaaggagagtctccggtcattcgcggaatgaagcgtaaccgtttaaaaacgttgctggcgaatgatatcaacctgtatggctggcatttgccgcttgacgcacatcctgagctgggcaataacgcacagctggcggcgttactggggatcacggtcatgggcgaaattgagccgttggtgccgtggggcgaactgaccatgcctgtgccgggactggagctggcttcctggattgaagcgcgtctgggacgtaagccgttatggtgtggcgataccggacctgaggtggtccagcgcgtcgcctggtgcacgggcggcgggcaaagttttatcgatagcgccgcgcgttttggcgtggatgcttttattactggcgaagtttctgaacagaccattcatagtgcccgcgagcagggattgcatttttatgctgcaggtcaccatgccactgaacgtggtggtattcgcgcattgagcgagtggctgaatgaaaataccgatcttgatgtgacctttattgatattcctaatcctgcataacgaataatcagagggatcgaaagtgcaacgagcgcgttgttatctgataggtgaaacggcggtagtgctggaactggaaccgccggtgacgctggctagccagaaacggatctggcgactggcgcagcgtctggtggatatgccgaatgtggttgaagccattcccggcatgaacaatatcacggtgattttgcgtaatcctgagagcctggcgctggatgccatagagcgtttgcaacgctggtgggaggagagcgaggcgctggagccggagtctcgctttattgaaattccggtggtttacggtggtgcaggcggaccggatttggcggtggtcgcggcgcattgcgggttgagcgaaaaacaggttgttgaattgcactcctccgtggaatacgtggtctggtttttaggttttcaaccgggcttcccgtatctcgggagtttgccggaacaactacacacgccacggcgcgctgaaccgcgcttactcgttccggcaggttctgtcgggatcggcgggccgcagactggtgtttatccgctggcaacgccgggtggctggcagttgattggtcataccagtctcagcctgtttgatccggcgcgtgacgaacccatcttattacgtccgggagacagcgtgcgctttgtaccgcagaaggagggagtatgctgaagattattcgtgcgggcatgtataccactgtgcaggatggcggtcgtcacggttttcgccagagcggtatcagccactgcggcgcactggatatgcccgcgttacgcattgctaacctactggtgggtaatgacgccaatgcccccgcgctggagatcacgctcggtcagttaactgttgagttcgaaactgatgggtggtttgctctgacgggtgccggttgcgaagcgcggctggatgataatgccgtctggaccggctggcgattgccgatgaaagcaggccagcgtttaacgcttaaacgcccgcagcacgggatgcgcagttatctggcggtcgcgggtggtattgatgttccgccggtaatgggcagttgcagcaccgatctcaaagtggggattggcgggctggaaggccgtttactgaaggatggtgaccgactcccgattggcaaaagcaagcgtgattctatggaagcgcagggcgttaaacagctgctgtggggcaaccgcattcgcgccttgccggggccggaatatcatgagttcgatcgcgccagccaggatgcattctggcgtagcccctggcagcttagcagccaaagtaaccgcatgggctatcgcttacaggggcaaattttaaaacgcaccaccgatcgcgaactgttatctcacggtttgttaccgggcgtggtgcaggtgccacataacgggcagccgattgtgttgatgaacgacgcacagaccaccggtggttacccgcgtattgcctgtatcattgaggctgatatgtaccatctggcgcaaattccgctcggtcagccgattcattttgtccagtgtagtctggaagaggcactaaaagcacggcaagatcagcaacgttattttgaacaattagcgtggcggctgcacaatgaaaattgacctgaacgccgatctgggcgaaggctgcgccagcgacgcagagctattaacgctggtttcctctgccaatattgcctgtggatttcatgcaggcgatgcgcaaatcatgcaggcttgcgtgcgtgaagcaataaaaaatggtgtcgcgattggcgctcacccgagttttcccgacagggaaaattttggtcgcagcgccatgcagctgccgccagaaaccgtttacgcccagacgctgtatcaaattggcgcgctggcaacgattgcccgtgcgcaaggcggcgtaatgcgtcatgtcaaaccgcacggcatgttgtacaaccaggcggcgaaagaagcacaactggcagacgccatcgccagagcggtatacgcttgcgatccagcattgattctcgtcgggctggcgggaagcgagctgattcgtgcaggcaagcaatatggtctgacaacgcgcgaggaagtgtttgccgatcgcggttatcaggctgacggcagcctggtgccgcgaagccagagtggcgcgttgattgaaaacgaagaacaggcgctggcgcaaacgctggagatggtgcaacacggcagagtcaaaagtatcaccggcgaatgggcaacggtcgcggcgcaaacggtctgcctgcatggcgacggcgagcacgcactggcgttcgcccgccgactacgctctgcatttgccgaaaaggggattgttgtcgcagcataaccccgattaataaagaatgaaaaaaggatatcaccatgcctgaaggcccggagatccgccgtgcagcggataacctggaggcggcgatcaaaggcaaaccactaactgatgtctggtttgccttcccgcagttaaaaccttatcaaagtcaacttatcggtcaacacgttacccatgtggaaacgcgtggtaaggcgttgttaactcatttttccaacgacttaacgctctacagccataatcagctttacggcgtctggcgcgtggttgataccggcgaagagccgcagaccacgcgagtattgcgggtaaaactgcaaacggctgacaaaaccattctgctttatagcgccagcgatattgagatgttgaccccggaacaactgaccacgcatccgtttttacaacgcgttggtcccgatgtgctggatccgaatctgacgccggaggtggtgaaagaacgattattgagcccgcgctttcgtaaccgtcagtttgctggattactgctcgatcaggcgtttctggctgggcttggcaattatttgcgggtggagatcctctggcaggttgggttgactggaaatcataaagcgaaagatctcaatgcggcgcaactggatgcactcgcacacgcgttactggagattcctcgattttcctacgctacgcgggggcaggtggatgagaataagcatcatggggcgctgtttcgctttaaggtttttcatcgagatggcgaaccgtgcgaacgttgtggcagcatcattgagaaaaccacgctgagttctcgcccgttttactggtgccctggctgccagcattaagcgctccgcttcggcgcataggtactaataaaccgcgcaatggcaggccctgtcagcaaaatactgaacaggcgtagggtttgcatcgccataatgagcgccatatcggcattgctccctgcggcgatgaccgccacggtatcaagcccgccggggctggtggcgaggtaggcagtcataaaatcaatgtgcataaaccgggtcagcccccacgccatacccgcacaaatagccagcagagcaaaaatgctcagcaggatttgcggtagcgggcgtagtgcccgcagtaagatttgtttatcgaaaccaagaccaatccgccagccaattgccatatacgccatcgccagcagccattccggtagttcgatggtgatgagctgaccagactggagcactgcgcccgccagcatcgggatgagcatcgtgccggaaggaagacgcagcaggcatcccactgtaccggcaacgaccgcgagcaaaatagtaagcaggagattaatgctcactggcgggaaccagacgatatgctggttaaccgcttcagcgttatcgcccagcatcatgcgggtgaccagaacagcggcccccgcgacgaacagcactcgcagatattgcataaacgccaccaggcgaatatctgcgccgtaatcttgcgccatagcgaccattgccgccgcgccgccaggagaggagccccaggcaccggtatttccaggcaaactgctatagcgcaccaataaccaacccacaatggcgctggaaagcagcgttaccagtaaaattgcaagcacgatcggccagttgacggccagggtggtgagaatgctaccagtgaggttttgcgcaatcatgcagccaagaatggcctgggcggcgagaaaagcagagcggggaagttgcagagtaattccgcgcatactaaagatgatcccggcgatcatcggcccaagtaatagcgccgccgggagatgtaccgcgaggaaaccaatagaaaggagaagacttagcacacataacattccccactgcaaaactggcatccttcgctccctcattattttctctttggtgtatcgatacagcataaagaaagctgggccaggaaaaaataacagcaatcaaggaaaaggggaaaatcagcaattttctgaaagagatgccctttccggcggcaaagggcatcatggtaaatcagttatagttaatcttaaaaagcaccactgtatcgaaggggccagcctcgatgggggtgcctggaatggagctaagttcagccgtataggttttttcgtagaccaacatgtcactggtgaaatcggcgtattcagcatatttattgaaggtataagggctggcgttttcatccagtaaacgtagcttcagaccattaccaatcaacaatgctttatcttcttcaaccaacgtttcttcggtataaaaggaggaactgactttaaatccgtcggtgcattgatcgttttggctcttggtcgttttaatactgaacgttttgctcattgtgtggcgacgtatatccagcaaattaaatttaccaaaatcaatcacctgtgtttccggactaatggaaaaattgacgctgcaatccagcacgcgaatgttttccagaccagtaatatgatatttcaggttttgggcagtagggtcttcgttaacgctaccggcaccgtcaaattgcacgacgatatagtcgctaagcgtactttgataatcatgcggcggcatttctcgtattttgacgtataaccgcatgcgagcgagaaaggtacggctcatatgaatattagcgggatcgccgctgcaaattttgttctgccatcccatcgcgatgatctgctcaggggtataaatatcaatgttcttactgtcgatacactggttagtgtcgatgcgactttttcccagactggcatcgtaatcgacaccgttgtatgtcacgccgagttgataataacgatcctgcacccccggataggggtttacccaggcgtagacatgctcgctttcaaagttgccgttggtattgttgtcacaatagacgggaattttaatatcgtcagattcccagatcttatcaccgggtttggcattgcctggtacagcaaacggttgaatcgcttcacttttttctactgcgccaccagatgtaccaaaatagcagttcagcgccattgcagacttcaacggcagaaataacaggcagatgacgagcaacaatcccttgccagcactcatttcgcctccactgcttgtaaacggcattgtccgctgcagttgagcgtcgtcatgcgtaatgcgccgtaatcatccatgtaaccgagataaaactggctgccgctataacttccggtgtttgtgttgaccgtactaaaaggtgcaaccatcacggttttgaagcctgggagaacgcctttttcatttctccccagataggcaatggtcagataatacgcggtaggatttttcagtgtcagttggttgccctgctggctgacctgtaactgcagttcgaccttttctcctgctttcttgcgtaatgcagccggtcgccagaacaatttaatacgactttgaatagcgacctgaagtatcgcatggtcgctgcttttatccggagcgggaggaatttcgcgcatattgtagaaaaatagcgtttcgcgatcgccaggtaattgtgtggtactggcttgtttcacaacccgcacctggcttgtcgctttcggttccagacgttgaatagggggcaaagcgaccagaagagcatcgcttttctcccctttttcattttctatccaggaataagcaagataaggcagtttgtcactttggttttcgatacgcaggctggtggctttgtcattggcgttaaacacaatgcgtgtgcgatcgggttgcaccgcagcattgcaacccaagctgatggttaacaacattaagggtaatcctttaataaatgtcattctcttttccttaattaatgacaaggtaaaatcaggcgtttggtcgtgtcttccagacgttctggcagatgaataatgcagctttgctcaccccagaccacggtaaacagttgattttcagcgacaccgcttaaccaggcatgtccttcctcgccaaccatacccacgctaatgccgctgtcatcctggcggatatccgcaccgaggggagggaactgaccgctggcgttgcgtatgatgacgttaacgtctttaccggaacgggaagccagacttttgtaacctatcgcgccttcaatccatgtttccttgatgacgttttctgcaactgttacgccgtcgggtaagtcattcatgttcaccgccacggtggaaggctggtaactggaaatcaacggcaccaccgcaatgccaaaatggttggtgtagtcgagattgccctgaaccggaatatctgccacgccatcggtgctgaccatcaggcgtggttcattggtggagctgcggcgatgaaatgctgcaccatattgggttgcggtgaaagaaccgctccagctgctgctgacggaactgtaatcactggcggcataggtaccagaaatatcccactcacccgcactactcaggtgctgatagttaccgctcacctgggctccattgtccggacgatcggattgcagtccggcagacatgccccagctattacgttcatccagcgtatcgttccagctcatgcggtgtatggtgctgtggctactgttttgcatgtcatagccaacccgaccaccgttaccgaaggggaggctaatgctcagataaatctggttgtcgcgatctttatcttcgtagtgggtcgtattgaaactcgtgctaatgctgatatctctccagtcaccaatatcaacattaaaacctgctgtgatgttggcggtcgtggaggcgtctgcattccaccaggtttgatgtagcaggttggcgtaaagattgaggtttagtggggtaatcggttggcccacggataagctgatcgtctgtttttcgtcctgcgcatcgctgtcgttgtatttgtgatccagatagttggcgtagctgtgaaaatgacgatcactgaagcgataagcggcgaggctaatcgtgctgttggtggcatccacttgtttgctgtaattaaaacggtagcttaagccccgctcgtcctgctgagtatcaaaatggctactggcccaggtgacatcaaaggacagtgcgccaagccacagcatattttgcccgatacccattgcggcagaatggtagtcatcatcagaaatcagcaggccgccgtacaggctggtgttactgagcatcccccaggaaacttcattgctaaaaaaggtttcattttcagtttgatgactcatggaaggccgtggctgacccgcggccaatttatagcgaacctgtccctggcgagtcaggaagggcgtgcttgctgcgctaacctggaaattgttcacccgaccatcttcttccgtcactttgacatccagcgtgccctgaacagactgattgaggtcatcaataataaacgggcctggcgggacttttttctggtaaatgacgcggccactttgactgatcgtcaccgtggcattggtctgtgcaataccgctaatttgtggggcgtagccacgcagctcccacggtaacattcgatcgtcactcgccagtgccgcgccggtataagaaaaaccatcgaaaatattggaactgaaatcggtttcgccgagggttaacttagagcctaattgcggtaatggacgaaaaagataggtgcggcttattccgccactctggtcatggttatcttcgctatcggtcttattaagctggtaatcactgcgtaagcgccatgccccggcgttaattccggcggtaccgtaggcattcaggttagtgctgctgctgccgtcctgtgggcggtagctgctggcaaacaagttgtaatccatcaggacaccggcaacaccttctttccatgtagaggggggagcccagttttcactgtgccacgccagccaggcttgcggaatactaatattcagttgctgattggcttgatcgaaattgaagagcatttcaggtcgggaactgaaatcaatacaccgatctatctgtggcaaggactgacggacatctggttttaaaccaaatttatcgaccagactatcattgatgcatggaatggttttgtcaccctttttttgccagttaattttttgcccattactgattttgttgttattcaccgcaacgctaacaaaatattcaccgggagcaatgactcctttttcctttaataaactaatatcaatgcggtcgcgcatacttttatcgagaacattcagattgaattcgaccgccattgcgcaaggcatcgccatgaccaggcaggatacaaaagagagtcgataaatattcacggtgtccatacctgataaatattttatgaaaggcggcgatgatgccgccaaaataatacttatttataatccagcacgtaggttgcgttagcggttacttcacctgccgtgacatcgactgcattatcaatttgttccatccaggcgaaaaagttcagcgtctgttcactactgcttgcatccaggtcaagatctggcgcggcactacctaatacgatgttaccgtcatttttgtccatcagtcgtacaccgaccccagttgcttcgcctgcactggtgttgctcaacaaaggcgtagcaccagttgtcttagccgtgctatcgaaggttacgccaactttggataccggcattccgctaccgttgtcagaagcaggcagatcacagttgatcaagcgaatgtcgacggccactttattgctatgatgctcccggtttatatgggttgtcgtgacttgtccaagatctatgtttttatcaatatcttctggatgaatttcacaaggtgcttcaataacctcccccttaaagtgaatttcgccagaaccttcatcagcagcataaacaggtgcagtgaacagcagagatacggccagtgcggccaatgttttttgtcctttaaacataacagagtcctttaaggatatagaataggggtatagctacgccagaatatcgtatttgattattgctagtttttagttttgcttaaaaatattgttagttttattaaatgcaaaactaaattattggtatcatgaatttgttgtatgatgaataaaatataggggggtatagatagacgtcattttcatagggttataaatgcgactaccatgaagtttttaattgaaagtattgggttgctgataatttgagctgttctattctttttaaatatctatataggtctgttaatggattttatttttacaattttttgtgtttaggcatataaaaatcaacccgccatatgaacggcgggttaaaatatttacaacttagcaatcaaccattaacgcttgatatcgcttttaaagtcgcgtttttcatatcctgtatacagctgacgcggacgggcaatcttcataccgtcactgtgcatttcgctccagtgggcgatccagccaacggtacgtgccattgcgaaaatgacggtgaacatggaagacggaatacccatcgctttcaggatgataccagagtagaaatcgacgttcgggtacagtttcttctcgataaagtacgggtcgttcagcgcgatgttttccagctccatagccacttccagcaggtcatccttcgtgcccagctctttcagcacttcatggcaggtttcacgcattacggtggcgcgcgggtcgtaatttttgtacacgcggtgaccgaagcccatcaggcggaaagaatcatttttgtctttcgcacgacgaacaaattccggaatgtgtttaacggagctgatttcttccagcattttcagcgccgcttcgttagcaccgccgtgcgcaggtccccacagactagcaatacctgctgcgatacaggcaaacgggttcgcaccgctagagccagcggtacgcacggtggaggtagaggcgttctgttcatggtcagcgtgcaggatcagaatacggtccatagcacgttccagaatcggattaacttcatacggttcgcacggcgtggagaacatcatattcaggaagttaccggcgtaggagagatcgttgcgcgggtaaacaaatggctgaccaatggaatacttgtaacacatcgcggccatggtcggcattttgctcagcaggcggaacgcggcaatttcacggtgacgaggattgttaacatccaggctgtcgtgatagaacgccgccagcgcgccggtaataccacacatgactgccattggatggctgtcgcgacggaaagcatggaacagacgggtaatctgctcgtggatcatggtatgacgggtcaccgtagttttaaattcgtcatactgttcctgagtcggtttttcaccattcagcaggatgtaacaaacttccaggtagttagaatcggtcgccagctgatcgatcgggaaaccgcggtgcagcaaaataccttcatcaccatcaataaaagtaattttagattcgcaggatgcggtactagtgaagcctgggtcaaaggtgaacacacctttactaccgagagtacggatatcaataacatcttgacccagcgtgcctttcagcacatccagttcaacagctgtatccccgttgagggtgagttttgcttttgtatcagccatttaaggtctccttagcgccttattgcgtaagactgccggaacttaaatttgccttcgcacatcaacctggctttacccgttttttatttggctcgccgctctgtgaaagaggggaaaacctgggtacagagctctgggcgcttgcaggtaaaggatccattgatgacgaataaatggcgaatcaagtacttagcaatccgaattattaaacttgtctaccactaataactgtcccgaatgaattggtcaatacttccacactgttacataagttaatcttaggtgaaataccgacttcataacttttacgcattatatgcttttcctggtaatgtttgtaacaactttgttgaatgattgtcaaattagatgattaaaaattaaataaatgttgttatcgtgacctggatcactgttcaggataaaacccgacaaactatatgtaggttaattgtaatgattttgtgaacagcctatactgccgccaggtctccggaacaccctgcaatcccgagccacccagcgttgtaacgtgtcgttttcgcatctggaagcagtgttttgcatgacgcgcagttatagaaaggacgctgtctgacccgcaagcagaccggaggaaggaaatcccgacgtctccaggtaacagaaagttaacctctgtgcccgtagtccccagggaataataagaacagcatgtgggcgttattcatgataagaaatgtgaaaaaacaaagacctgttaatctggacctacagaccatccggttccccatcacggcgatagcgtccattctccatcgcgtttccggtgtgatcacctttgttgcagtgggcatcctgctgtggcttctgggtaccagcctctcttcccctgaaggtttcgagcaagcttccgcgattatgggcagcttcttcgtcaaatttatcatgtggggcatccttaccgctctggcgtatcacgtcgtcgtaggtattcgccacatgatgatggattttggctatctggaagaaacattcgaagcgggtaaacgctccgccaaaatctcctttgttattactgtcgtgcttagtcttctcgcaggagtcctcgtatggtaagcaacgcctccgcattaggacgcaatggcgtacatgatttcatcctcgttcgcgctaccgctatcgtcctgacgctctacatcatttatatggtcggttttttcgctaccagtggcgagctgacatatgaagtctggatcggtttcttcgcctctgcgttcaccaaagtgttcaccctgctggcgctgttttctatcttgatccatgcctggatcggcatgtggcaggtgttgaccgactacgttaaaccgctggctttgcgcctgatgctgcaactggtgattgtcgttgcactggtggtttacgtgatttatggattcgttgtggtgtggggtgtgtgatgaaattgccagtcagagaatttgatgcagttgtgattggtgccggtggcgcaggtatgcgcgcggcgctgcaaatttcccagagcggccagacctgtgcgctgctctctaaagtcttcccgacccgttcccataccgtttctgcgcaaggcggcattaccgttgcgctgggtaatacccatgaagataactgggaatggcatatgtacgacaccgtgaaagggagcgactatatcggtgaccaggacgcgattgaatatatgtgtaaaaccgggccggaagcgattctggaactcgaacacatgggcctgccgttcagccgtctcgatgatggtcgtatctatcaacgtccgtttggcggtcagagcaaaaacttcggcggcgagcaggcggcacgcactgcggcagcagctgaccgtaccggtcacgcactgttgcacacgctttatcagcagaacctgaaaaaccacaccaccattttctccgagtggtatgcgctggatctggtgaaaaaccaggatggcgcggtggtgggttgtaccgcactgtgcatcgaaaccggtgaagtggtttatttcaaagcccgcgctaccgtgctggcgactggcggagcagggcgtatttatcagtccaccaccaacgcccacattaacaccggcgacggtgtcggcatggctatccgtgccggcgtaccggtgcaggatatggaaatgtggcagttccacccgaccggcattgccggtgcgggcgtactggtcaccgaaggttgccgtggtgaaggcggttatctgctgaacaaacatggcgaacgttttatggagcgttatgcgccgaacgccaaagacctggcgggccgtgacgtggttgcgcgttccatcatgatcgaaatccgtgaaggtcgcggctgtgatggtccgtgggggccacacgcgaaactgaaactcgatcacctgggtaaagaagttctcgaatcccgtctgccgggtatcctggagctttcccgtaccttcgctcacgtcgatccggtgaaagagccgattccggttatcccaacctgtcactacatgatgggcggtattccgaccaaagttaccggtcaggcactgactgtgaatgagaaaggcgaagatgtggttgttccgggactgtttgccgttggtgaaatcgcttgtgtaagcgtacacggcgctaaccgtctgggcggcaacagcctgctggacctggtggtctttggtcgcgcggcaggtctgcatctgcaagagtctatcgccgagcagggcgcactgcgcgatgccagcgagtctgatgttgaagcgtctctggatcgcctgaaccgctggaacaataatcgtaacggtgaagatccggtggcgatccgtaaagcgctgcaagaatgtatgcagcataacttcagcgtcttccgtgaaggtgatgcgatggcgaaagggcttgagcagttgaaagtgatccgcgagcgtctgaaaaatgcccgtctggatgacacttccagcgagttcaacacccagcgcgttgagtgcctggaactggataacctgatggaaacggcgtatgcaacggctgtttctgccaacttccgtaccgaaagccgtggcgcgcatagccgcttcgacttcccggatcgtgatgatgaaaactggctgtgccactccctgtatctgccagagagcgaatccatgacgcgccgaagcgtcaacatggaaccgaaactgcgcccggcattcccgccgaagattcgtacttactaatgcggagacaggaaaatgagactcgagtttagtatttatcgctataacccggatgttgatgatgctccgcgtatgcaggattacaccctggaagcggatgaaggtcgcgacatgatgctgctggatgcgcttatccagctaaaagagaaagatcccagcctgagcttccgccgctcctgccgtgaaggtgtgtgcggttccgacggtctgaacatgaacggcaagaatggtctggcctgtattaccccgattagcgcactcaaccagccgggcaagaagattgtgattcgcccgctgccaggtttaccggtgatccgcgatttggtggtagacatgggacaattctatgcgcaatatgagaaaattaagccttacctgttgaataatggacaaaatccgccagctcgcgagcatttacagatgccagagcagcgcgaaaaactcgacgggctgtatgaatgtattctctgcgcatgttgtagtacctcttgtccgtctttctggtggaatcccgataagtttatcggcccggcaggcttgttagcggcatatcgtttcctgattgatagccgtgataccgagactgacagccgcctcgacggtttgagtgatgcattcagcgtattccgctgtcacagcatcatgaactgcgtcagtgtatgtccgaaggggctgaacccgacgcgcgccatcggccatatcaagagcatgttgttgcaacgtaatgcgtaaaccgtaggcctgataagacgcgcaagcgtcgcatcaggcaaccagtgccggatgcggcgtgaacgccttatccggcctacaagtcattacccgtaggcctgataagcgcagcgcatcaggcgtaacaaagaaatgcaggaaatctttaaaaactgcccctgacactaagacagtttttaaaggttccttcgcgagccactacgtagacaagagctcgcaagtgaaccccggcacgcacatcactgtgcgtggtagtatccacggcgaagtaagcataaaaaagatgcttaagggatcacgatgcagaacagcgctttgaaagcctggttggactcttcttacctctctggcgcaaaccagagctggatagaacagctctatgaagacttcttaaccgatcctgacagcgttgacgctaactggcgtaacacgttccagcagttacctggtacgggagtcaaaccggatcaattccactctcaaacgcgtgaatatttccgccgcctggcgaaagacgctagtcgttactctagtacgatctccgaccctgacaccaatgtgaagcaggttaaagtcctgcagctcattaacgcataccgcttccgtggtcaccagcatgcgaatctcgatccgctgggactgtggcagcaagataaagtggccgatctggatccgtctttccacgatctgaccgaagcagacttccaggagaccttcaacgtcggtagttttgccagcggcaaagaaaccatgaaactcggcgagctgctggaagccctcaagcaaacctactgcggcccgattggtgccgagtatatgcacattaccagcaccgaagaaaaacgctggatccaacagcgtatcgagtctggtcgcgcgactttcaatagcgaagagaaaaaacgcttcttaagcgaactgaccgccgctgaaggtcttgaacgttacctcggcgcaaaattccctggcgcaaaacgcttcagcctggaaggcggtgacgcgttaatcccgatgcttaaagagatgatccgccacgctggcaacagcggcacccgcgaagtggttctcgggatggcgcaccgtggtcgtctgaacgtgctggtgaacgtgctgggtaaaaaaccgcaagacttgttcgacgagttcgccggtaaacataaagaacacctcggcacgggtgacgtgaaataccacatgggcttcagctctgacttccagaccgatggcggcctggtgcacctggcgctggcgtttaacccgtctcaccttgagattgtaagcccggtagttatcggttctgttcgtgcccgtctggacagacttgatgagccgagcagcaacaaagtgctgccaatcaccatccacggtgacgccgcagtgaccgggcagggcgtggttcaggaaaccctgaacatgagcaaagcgcgtggttatgaagttggcggtacggtacgtatcgttatcaacaaccaggttggtttcaccacctctaatccgctggatgcccgttctacgccgtactgtactgatatcggtaagatggttcaggccccgattttccacgttaacgcggacgatccggaagccgttgcctttgtgacccgtctggcgctcgatttccgtaacacctttaaacgtgatgtcttcatcgacctggtgtgctaccgccgtcacggccacaacgaagccgacgagccgagcgcaacccagccgctgatgtatcagaaaatcaaaaaacatccgacaccgcgcaaaatctacgctgacaagctggagcaggaaaaagtggcgacgctggaagatgccaccgagatggttaacctgtaccgcgatgcgctggatgctggcgattgcgtagtggcagagtggcgtccgatgaacatgcactctttcacctggagcccgtacctcaaccacgaatgggacgaagagtacccgaacaaagttgagatgaagcgcctgcaggagctggcgaaacgcatcagcacggtgccggaagcagttgaaatgcagtctcgcgttgccaagatttatggcgatcgccaggcgatggctgccggtgagaaactgttcgactggggcggtgcggaaaacctcgcttacgccacgctggttgatgaaggcattccggttcgcctgagcggtgaagactccggtcgcggtaccttcttccaccgccacgcggtgatccacaaccagtctaacggttccacttacacgccgctgcaacatatccataacgggcagggcgcgttccgtgtctgggactccgtactgtctgaagaagcagtgctggcgtttgaatatggttatgccaccgcagaaccacgcactctgaccatctgggaagcgcagttcggtgacttcgccaacggtgcgcaggtggttatcgaccagttcatctcctctggcgaacagaaatggggccggatgtgtggtctggtgatgttgctgccgcacggttacgaagggcaggggccggagcactcctccgcgcgtctggaacgttatctgcaactttgtgctgagcaaaacatgcaggtttgcgtaccgtctaccccggcacaggtttaccacatgctgcgtcgtcaggcgctgcgcgggatgcgtcgtccgctggtcgtgatgagcccgaaatccctgctgcgtcatccgctggcggtttccagcctcgaagaactggcgaacggcaccttcctgccagccatcggtgaaatcgacgagcttgatccgaagggcgtgaagcgcgtagtgatgtgttctggtaaggtttattacgacctgctggaacagcgtcgtaagaacaatcaacacgatgtcgccattgtgcgtatcgagcaactctacccgttcccgcataaagcgatgcaggaagtgttgcagcagtttgctcacgtcaaggattttgtctggtgccaggaagagccgctcaaccagggcgcatggtactgcagccagcatcatttccgtgaagtgattccgtttggggcttctctgcgttatgcaggccgcccggcctccgcctctccggcggtagggtatatgtccgttcaccagaaacagcaacaagatctggttaatgacgcgctgaacgtcgaataaataaaggatacacaatgagtagcgtagatattctggtccctgacctgcctgaatccgtagccgatgccaccgtcgcaacctggcataaaaaacccggcgacgcagtcgtacgtgatgaagtgctggtagaaatcgaaactgacaaagtggtactggaagtaccggcaagtgcagacggcattctggatgcggttctggaagatgaaggtacaacggtaacgtctcgtcagatccttggtcgcctgcgtgaaggcaacagcgccggtaaagaaaccagcgccaaatctgaagagaaagcgtccactccggcgcaacgccagcaggcgtctctggaagagcaaaacaacgatgcgttaagcccggcgatccgtcgcctgctggctgaacacaatctcgacgccagcgccattaaaggcaccggtgtgggtggtcgtctgactcgtgaagatgtggaaaaacatctggcgaaagccccggcgaaagagtctgctccggcagcggctgctccggcggcgcaaccggctctggctgcacgtagtgaaaaacgtgtcccgatgactcgcctgcgtaagcgtgtggcagagcgtctgctggaagcgaaaaactccaccgccatgctgaccacgttcaacgaagtcaacatgaagccgattatggatctgcgtaagcagtacggtgaagcgtttgaaaaacgccacggcatccgtctgggctttatgtccttctacgtgaaagcggtggttgaagccctgaaacgttacccggaagtgaacgcttctatcgacggcgatgacgtggtttaccacaactatttcgacgtcagcatggcggtttctacgccgcgcggcctggtgacgccggttctgcgtgatgtcgataccctcggcatggcagacatcgagaagaaaatcaaagagctggcagtcaaaggccgtgacggcaagctgaccgttgaagatctgaccggtggtaacttcaccatcaccaacggtggtgtgttcggttccctgatgtctacgccgatcatcaacccgccgcagagcgcaattctgggtatgcacgctatcaaagatcgtccgatggcggtgaatggtcaggttgagatcctgccgatgatgtacctggcgctgtcctacgatcaccgtctgatcgatggtcgcgaatccgtgggcttcctggtaacgatcaaagagttgctggaagatccgacgcgtctgctgctggacgtgtaatagtttaagtttcacctgcactgtagaccggataaggcattatcgccttctccggcaattgaagcctgatgcgacgctgacgcgtcttatcaggcctacgggaccaccaatgtaggtcggataaggcgcaagcgccgcatccgacaagcgatgcctgatgtgacgtttaacgtgtcttatcaggcctacgggtgaccgacaatgcccggaagcgatacgaaatattcggtctacggtttaaaagataacgattactgaaggatggacagaacacatgaacttacatgaatatcaggcaaaacaactttttgcccgctatggcttaccagcaccggtgggttatgcctgtactactccgcgcgaagcagaagaagccgctagtaaaatcggtgccggtccgtgggtagtgaaatgtcaggttcacgctggtggccgcggtaaagcgggcggtgtgaaagttgtaaacagcaaagaagacatccgtgcttttgcagaaaactggctgggcaagcgtctggtaacgtatcaaacagatgccaatggccaaccggttaaccagattctggttgaagcagcgaccgatatcgctaaagagctgtatctcggtgccgttgttgaccgtagttcccgtcgtgtggtctttatggcctccaccgaaggcggcgtggaaatcgaaaaagtggcggaagaaactccgcacctgatccataaagttgcgcttgatccgctgactggcccgatgccgtatcagggacgcgagctggcgttcaaactgggtctggaaggtaaactggttcagcagttcaccaaaatcttcatgggcctggcgaccattttcctggagcgcgacctggcgttgatcgaaatcaacccgctggtcatcaccaaacagggcgatctgatttgcctcgacggcaaactgggcgctgacggcaacgcactgttccgccagcctgatctgcgcgaaatgcgtgaccagagccaggaagatccgcgtgaagcacaggctgcacagtgggaactgaactacgttgcgctggacggtaacatcggttgtatggttaacggcgcaggtctggcgatgggtacgatggacatcgttaaactgcacggcggcgaaccggctaacttccttgacgttggcggcggcgcaaccaaagaacgtgtaaccgaagcgttcaaaatcatcctctctgacgacaaagtgaaagccgttctggttaacatcttcggcggtatcgttcgttgcgacctgatcgctgacggtatcatcggcgcggtagcagaagtgggtgttaacgtaccggtcgtggtacgtctggaaggtaacaacgccgaactcggcgcgaagaaactggctgacagcggcctgaatattattgcagcaaaaggtctgacggatgcagctcagcaggttgttgccgcagtggaggggaaataatgtccattttaatcgataaaaacaccaaggttatctgccagggctttaccggtagccaggggactttccacagtgaacaggccattgcatacggcactaaaatggttggcggcgtaaccccaggtaaaggcggcaccacccacctcggcctgccggtgttcaacaccgtgcgtgaagccgttgctgccactggcgctaccgcttctgttatctacgtaccagcaccgttctgcaaagactccattctggaagccatcgacgcaggcatcaaactgattatcaccatcactgaaggcatcccgacgctggatatgctgaccgtgaaagtgaagctggatgaagcaggcgttcgtatgatcggcccgaactgcccaggcgttatcactccgggtgaatgcaaaatcggtatccagcctggtcacattcacaaaccgggtaaagtgggtatcgtttcccgttccggtacactgacctatgaagcggttaaacagaccacggattacggtttcggtcagagcacctgtgtcggtatcggcggtgacccgatcccgggctctaactttatcgacattctcgaaatgttcgaaaaagatccgcagaccgaagcgatcgtgatgatcggtgagatcggcggtagcgctgaagaagaagcagctgcgtacatcaaagagcacgttaccaagccagttgtgggttacatcgctggtgtgactgcgccgaaaggcaaacgtatgggccacgcgggtgccatcattgccggtgggaaagggactgcggatgagaaattcgctgctctggaagccgcaggcgtgaaaaccgttcgcagcctggcggatatcggtgaagcactgaaaactgttctgaaataaatatctgtaataagaaatagccctcgccgcttccctctacaggaatggcgaagggctgtcggtttcgacatggttggccatcgtatgatggccttttttgtgcttatcggctactttttcgctgcgctatcagggtaaatttatagtcatcggtattaaaagcgttgcggctatattcaaacacccgaccatcaactaaatatccacggcttactttttcaagaatcggctttgtctggctgatattaagcagacggctcatctcttcggttggcatcagaggaatgatttcctgttcgctacgatcgataaccattttcttcacttcttcgataaagtgatatttgctattttccatgacctgccaggtgagatccgggaacaacgcaagcggcatccaggtttcttccagcgccattggcttttgcttgcgatagcgcacgcgcttcacatgccacacacgatcctgcggggtgatttgtagctgttgctgaagaaaatcgtcagccggaatcacttcgaatatcagaacttcactgtgtgtatcgacgtgacggtcgctcagtttttcatcaaaactggttaactgaaaaatatcgtaattgacccgctcttctttgacgtaagtcccgctgccctgaatgctttcgaggatctgctgctcgactagctggcgcaaagcctgacgcaccgtaacccggctgacgccaaactctgtttgtagcgcactttcagtgggtaacgcatcgccaggtttaagctcgccacgcgcaatttgttcacgaatgcgatcggcaatctgccggtataagggcttgtgtcccatttttagtatctcattaatacgaatttaaccattatgcccgataaattcatcctgtaaataatacaaatacaatacaaataatttcaatcaagtgaaattgatcacataatggtattgttttatcgggcacactggcgcgactataaaaacgatcaagtgaggatcatgatgaatctgacgactctgacccaccgcgatgcgttgtgtctgaatgcgcgctttaccagccgtgaagaggccatccacgcgttgactcaacgtcttgctgctctggggaaaatttccagtactgagcaatttctggaagaagtgtatcgccgtgaaagccttggcccgaccgccttaggtgaagggttggctgtgccgcatggcaaaactgctgcggtaaaagaagcggcgtttgcggtcgccacactcagcgagccgcttcagtgggaaggcgttgatggcccggaagcagttgatttagtggtgctgctggcgattccccccaatgaagcgggtactacgcatatgcaactgctgacagcgctgaccacgcgccttgcggatgatgagattcgggcgcgtatacagagcgcgacgacgcctgatgagttgctcagcgcgctggatgacaagggaggcacgcaaccttctgcctctttttccaacgcgccaactatcgtctgcgtaacggcctgtccggcgggtattgctcacacctatatggctgcggaatatctggaaaaagccggacgcaaactcggcgtaaatgtttacgttgaaaaacaaggcgctaacggcattgaagggcgtttaacggcggatcaactcaatagtgcaaccgcctgtatttttgcggctgaagtcgccatcaaggagagtgagcgttttaatggcattcccgcgcttagtgtgcctgttgccgagccgattcgccatgcagaagcgttgatccaacaagcgcttaccctcaagcgtagcgatgagacgcgtaccgtacagcaagatacgcaaccggtgaaaagtgtcaaaacggagctgaaacaggcactgttgagcggaatctcttttgccgtaccgttgattgtcgcggggggcacggtgctggcggtcgcggtattactgagccaaatcttcgggctacaagatctgtttaatgaagaaaactcctggctgtggatgtaccgcaagctgggcggcgggctgctcggaattttgatggtaccggtgctcgcggcctataccgcctattctctggcagataaaccggcgttagcgccaggctttgcggctggacttgccgccaacatgatcggctccgggtttctcggcgcggtcgttggcggattgatagccggttacttgatgcgctgggtgaaaaatcacttgcgtcttagcagtaaattcaatggattcctgactttttatctctacccggtgctcggtacgttgggagcgggcagtctgatgctgtttgtggtgggggaacctgtcgcctggatcaataacagccttaccgcctggctgaacggtctgagtggaagtaacgcgctgttgctgggtgccattctcggttttatgtgttcctttgaccttggagggccagtgaataaagccgcttatgcattctgcctgggcgcaatggcgaacggcgtttacggcccgtatgccattttcgcctccgtcaaaatggttagcgcatttaccgtaaccgcttccacgatgctcgcaccgcgcctgtttaaagagtttgaaattgagaccgggaaatccacctggctgttagggctggcaggtattaccgaaggggcgatcccgatggcgattgaagatccgctgcgggttattggtagctttgtgctgggctctatggtaacgggcgctattgtcggtgcgatgaatatcggccttagcacacccggtgccggcattttcagcctctttttacttcatgataatggcgcgggcggtgttatggcggcaattggctggtttggcgcggcattggtgggggctgcaatcagcactgcaattctcctgatgtggcggcgtcacgcggttaagcatggcaactatctgactgatggcgtaatgccataaacaaaaaggaaacgacgatgaaagcagtatctcgcgttcacatcaccccgcatatgcactgggatcgagagtggtatttcaccaccgaagagagtcgtattctgctggtcaataatatggaagagatcctgtgccgactggaacaggacaacgaatacaaatattacgtactcgacgggcaaacggcgatcctcgaagattatttcgcggtgaaaccggaaaacaaagaccgtgtgaagaaacaggtagaagccggcaagttgattatcggcccctggtatacccagaccgataccacgattgtttctgcggaatccatcgtccgtaatctgatgtacggaatgcgtgactgcctcgcgtttggcgagccgatgaaaataggttatttaccagattcctttggcatgtccgggcaactgccgcatatctacaatggatttggcattacccgcaccatgttctggcgcggatgtagcgagcgccacggtactgataaaaccgagtttttgtggcaaagcagtgacggtagcgaagtgacggcgcaggtgctgccgctgggctacgccatcggtaagtacttacctgccgacgaaaacggattacgtaaacgcctcgacagttattttgacgtgctggaaaaagcgtctgtaaccaaagagattttgctgccgaatgggcatgaccagatgccattgcagcaaaatatcttcgaagtgatggataagctacgtgagatctaccctcaacgtaagtttgtgatgagccgctttgaagaggtatttgagaagatcgaagcgcagcgagataatctggcaaccctgaaaggggaatttattgatggcaaatatatgcgcgtgcatcgcaccatcggttctacgcgtatggatatcaaaattgcccacgcgcgtattgaaaataagattgttaatctgctggaaccgctggcaacactggcctggacgttgggttttgaataccaccacggcttgctggagaaaatgtggaaagagatcttaaaaaatcatgcccacgacagtatcggctgctgctgtagtgacaaagttcatcgcgaaatcgtcgcccgcttcgaactggctgaagacatggcggataatctgattcgtttctacatgcgcaaaattgccgacaacatgccgcagagcgacgccgacaaactcgtcctgtttaacctgatgccctggccgcgtgaagaagttatcaacaccactgtgcggctgcgcgccagccagtttaatttgcgggacgatcgcggtcagcctgtaccgtattttattcgccatgcccgtgagatcgatccaggcctaatcgatcggcaaatagttcattacggtaattacgatccctttatggagtttgatatacagatcaaccagattgtcccttctatgggctatcgcacgctttatatcgaagcgaatcagcctggcaacgtaattgcggcaaaaagtgacgctgaagggatactggaaaatgctttctggcaaattgcgctcaatgaggatggttctctgcaactggtagataaagacagcggtgtgcgctatgaccgggtattgcaaattgaagaaagctctgatgatggtgatgaatatgactatagtcccgcaaaagaagagtgggtaattaccgcagcgaacgcgaaaccgcaatgcgatattattcatgaagcctggcagagcagggctgttatccgctatgacatggcagtgccgctcaatttgagtgaacgcagcgcccggcaatccactggcagagtaggggtggtgttggttgtcactcttagtcataacagcaggcgtattgatgtggatatcaatcttgataaccaggctgacgatcatcgccttcgtgtcctggtccctacaccttttaacaccgacagtgttctggcagatacgcagtttggtagcctaacgcgccccgtgaacgacagtgcaatgaacaactggcagcaagaaggctggaaagaagcgccggttccggtatggaatatgctcaactatgttgccttacaggaagggcgtaacggcatggctgtctttagcgaagggttacgtgaatttgaagtcatcggtgaagagaagaaaacctttgccattacgttgctgcgtggcgtgggcttactgggcaaagaagatctgcttttaaggcctgggcggcctagcggaattaaaatgccagtcccggacagtcaactacgtggtctgctttcttgtcgcctaagtttattgagttataccggtacgccaaccgccgctggtgtagctcagcaggcgcgagcatggctgactccagtacagtgttacaacaaaatcccatgggatgtgatgaagctcaacaaagccggattcaacgtgccggaaagttatagtttgttgaaaatgcccccagtgggatgcctgataagcgcacttaagaaagctgaagaccgacaagaagtgattttacggctgtttaatccggctgaaagtgcaacctgtgatgcgactgttgctttcagtcgcgaggtgatttcttgcagtgaaacgatgatggatgaacacattaccaccgaggaaaatcaaggtagtaatctaagcgggccttttttacccggccagagtcggacgttcagttaccggcttgcctgaatagcaatcaaaccgaagccacatatgcgcggccagattgttgacaaagggcgctttgttcatgccggatacggcatgaacgctttattcggtctacaaaagcaggcaaattcaatatattgcagagatgatgtagacactggcaagcgtagcgcatcaggtaattttgcgtttatcttcactctcaagccacgtatatgtggctttatttttaacaaaataataaccctgggtgagttaattataatataattataagttaactaaatgttaatattggcggggtggatttatgcctttattagtaatcctgaaactctgcgtcgtattagccagtgaccaaaaaaagaattaaggtcaaccgtgctgtttttgcttcgtctctttttatctttaattgccaaccgaaactaatttcagccttataactcacacattttaaacataaatgtcactaaagttaccttattgaaacatgattaacataatttgtaggaattgatatttatcaatgtataagtcttggaaatgggcatcaaaaagagataaattgttctcgatcaaattggctgaaaggcggtaatttagctataaattgatcaccgtcgaaaaatgcaaatttgcttcaacaaaaacctgtttattgtaaggattttgcggcgtaatatatacgtgggatcaatttgagtttttattaacatgtttgcaacctttctttacgccgtttttgtgtgcattcacatggtatgatgaaagtgttcaaacaaatttctattggggcatgcgtgtgaccctttctaacggggttcactctcggagtcttcatgcgatgagcaaggagtcatgatgttagatatagtcgaactgagccgcttacagtttgccttgaccgcgatgtaccacttcctttttgtgccactgacgctcggtatggcgttcctgctggccattatggaaacggtctacgtcctctccggcaaacagatttataaagatatgaccaagttctggggcaagttgtttggtatcaacttcgctctgggtgtggctaccggtctgaccatggagttccagttcgggactaactggtcttactattcccactatgtaggggatatcttcggtgcgccgctggcaatcgaaggtctgatggccttcttcctcgaatccacctttgtaggtctgttcttcttcggttgggatcgtctgggtaaagttcagcatatgtgtgtcacctggctggtggcgctcggtagtaacctgtccgcactgtggattctggttgcgaacggctggatgcaaaacccaatcgcgtccgatttcaactttgaaactatgcgtatggagatggtgagcttctccgagctggtgcttaacccggttgctcaggtgaaattcgttcacactgtagcgtctggttatgtgactggcgcgatgttcatcctcggtatcagcgcatggtatatgctgaaaggtcgtgacttcgccttcgctaaacgctcctttgctatcgctgccagcttcggtatggctgctgttctgtctgttattgttctgggtgatgaatccggctacgaaatgggcgacgtgcagaaaaccaaactggctgctattgaagccgagtgggaaacgcaacctgcgcctgctgcctttactctgttcggcattcctgatcaggaagaggagacgaacaaatttgcgattcagatcccttacgcactgggcatcattgcaacgcgttccgtggataccccggttatcggcctgaaagagctgatggtgcagcatgaagaacgcattcgtaacgggatgaaggcgtactctctgctcgaacaactgcgttctggttctaccgaccaggcggttcgtgaccagttcaatagcatgaagaaagacctcggttacggtctgctgctgaaacgctatacgccaaacgtggctgatgcgactgaagcgcagattcaacaggcaaccaaagactccatcccgcgtgtagcgccgctgtactttgcgttccgtatcatggtggcgtgtggcttcctgcttctggcaatcatcgcgctctctttctggagtgtcatccgcaaccgcattggcgagaaaaaatggcttctgcgcgccgcgctgtacggtattccgctgccgtggattgctgtagaagcgggctggttcgtggctgaatatggccgccaaccgtgggctatcggtgaagtgctgccgacagctgtggcgaacagcagtctgaccgcaggcgatctcatcttcagtatggtgctgatttgcggcctgtataccctgttcctggtggcagaattgttcttaatgttcaagtttgcacgcctcggcccaagcagcctgaaaaccggtcgctatcactttgagcagtcttccacgactactcagccggcacgctaagacaggagtcgtcaaatgatcgattatgaagtattgcgttttatctggtggctgctggttggcgttctgctgattggttttgcagtcactgacggtttcgacatgggggtgggcatgctcacccgtttcctcggtcgtaacgacaccgagcgtcgaattatgattaactccattgcaccacactgggacggtaaccaggtttggctgatcaccgcgggcggcgcactctttgctgcctggccgatggtctatgccgctgcgttctccggcttctatgtggcgatgatcctcgtgctggcgtctttgttcttccgtccggtcggttttgactaccgctccaagattgaagaaacccgctggcgtaacatgtgggactggggcatcttcattggtagcttcgttccgccgctggtaattggtgtagcgttcggtaacctgttgcagggcgtaccgttcaacgttgatgaatatctgcgtctgtactacaccggtaacttcttccagttgcttaacccgttcggcctgctggcaggcgtggtgagcgtagggatgatcattactcagggcgcaacctatctgcaaatgcgtaccgtgggcgaactgcacctgcgtacccgtgcaacggctcaggtggctgcgctggtgacactggtctgtttcgcactggctggcgtatgggtgatgtacggtatcgatggttatgtcgtgaaaagcacaatggaccattacgcagcctctaacccactgaataaagaagtggttcgtgaagctggcgcatggctggttaacttcaacaacacgccaattctgtgggctattccggcactgggtgtggttctgccgctgctgaccatcctgactgcacgtatggataaagccgcgtgggcgtttgtgttctcctccctgacgctggcctgcatcatcctgacagccggtatcgcaatgttcccgtttgtgatgccgtccagcaccatgatgaacgcaagtctgacaatgtgggatgcaacttccagccagctgacgcttaacgtcatgacctgggttgcggtggttctggtaccgatcattctgctctacaccgcctggtgttactggaaaatgttcggtcgtatcaccaaagaagatattgaacgtaacacccactctctgtactaagtaaggagctaaaaatgtggtatttcgcatggattctgggaacgcttcttgcctgtagctttggggtaatcaccgcgctggcgcttgaacacgtcgaaagtggcaaagccggtcaagaagacatctgatgagtaagattatcgcgactttgtatgcggtaatggacaagcgccccctgcgggcgctttccttcgtgatggcgcttctgttagcaggatgtatgttttgggacccatctcgttttgccgcgaagaccagtgaactggaaatctggcatggtttattgctgatgtgggccgtctgtgctggtgtgattcacggcgtgggctttcgtccgcagaaggttctttggcaagggattttttgcccattgcttgccgatattgttctcattgtcgggctgattttcttcttcttttaaatcagaattctctttaaaaaattatgggccgctccaggcccataaatttttacgctcccttaacttgccctcattcccaaacctcaatcgcgcgcgtatagtagcagcgtttaaaagctctaacttttgttgcattaccgggatgtaaagtgaatacaacgctgtttcgatggccggttcgcgtctactatgaagataccgatgccggtggtgtggtgtaccacgccagttacgtcgctttttatgaaagagcacgcacagagatgctgcgtcatcatcacttcagtcagcaggcgctgatggctgaacgcgttgcctttgtggtacgtaaaatgacggtggaatattacgcacctgcgcggctcgacgatatgctcgaaatacagactgaaataacaagtatgcgtggcacctctttggttttcacgcaacgtattgtcaacgccgagaatactttgctgaatgaagcagaggttctggttgtttgcgttgacccactcaaaatgaagcctcgtgcgcttcccaagtctattgtcgcggagtttaagcagtgactgacatgaatatccttgatttgttcctgaaggctagccttctggttaaacttatcatgttgattttgattggttttagtatcgcatcttgggccattattatccagcggacccgtattcttaacgcagcggcgcgcgaagccgaagcgtttgaagataaattctggtctggaatcgaactctctcgcctctatcaagagagccaggggaaacgggataatctgactggtagcgaacaaatcttttacagcgggttcaaagagtttgtgcgcctgcatcgtgccaatagccatgcgccggaagccgtagtggaaggggcgagccgtgctatgcgtatctccatgaaccgtgaacttgaaaatctggaaacgcacattccgttcctcggtacggttggctccatcagcccgtatattggtctgtttggtacggtctgggggatcatgcacgcctttatcgccctcggggcggtaaaacaagcaacactgcaaatggttgcgcccggtatcgcagaagcgttgattgcgactgcaattggtctgtttgccgctatcccggcagttatggcctacaaccgcctcaaccagcgcgtaaacaaactggaactgaattacgacaactttatggaagagtttaccgcgattctgcaccgccaggcgtttaccgttagcgagagcaacaaggggtaagccatggccagagcgcgtggacgaggtcgtcgcgatctcaagtccgaaatcaacattgtaccgttgctggacgtactgctggtgctgttgctgatctttatggcgacagcgcccatcatcacccagagcgtggaggtcgatctgccagacgctactgaaagtcaggcggtgagcagtaacgataatccgccagtgattgttgaagtgtctggtattggtcagtacaccgtggtggttgagaaagatcgcctggagcgtttaccaccagagcaggtggtggcggaagtgtccagccgtttcaaggccaacccgaaaacggtctttctgatcggtggcgcaaaagatgtgccttacgatgaaataattaaagcactgaacttgttacatagtgcgggtgtgaaaagcgttggtttaatgacgcagcctatctaaacatctgcgtttcccttgcttgaaagagagcgggtaacaggcgaacagtttttggaaaccgagagtgagtaaggcaaccgaacaaaacgacaagctcaagcgggcgataattattagtgcagtgctgcatgtcatcttatttgcggcgctgatctggagtagcttcgatgagaatatagaagctagtgccggaggcggcggtggtagctccatcgacgctgtcttggttgatagtggtgcggtagttgagcagtacaaacgcatgcaaagccaggaaagtagcgcgaagcgttctgatgaacagcgcaagatgaaggaacagcaggctgctgaagaactgcgtgagaaacaagcggctgaacaggaacgcctgaagcaacttgagaaagagcggttagcggctcaggagcagaaaaagcaggctgaagaagccgcaaaacaggccgagttaaagcagaagcaagctgaagaggcggcagcgaaagcggcggcagatgctaaagcgaaggccgaagcagatgctaaagctgcggaagaagcagcgaagaaagcggctgcagacgcaaagaaaaaagcagaagcagaagccgccaaagccgcagccgaagcgcagaaaaaagccgaggcagccgctgcggcactgaagaagaaagcggaagcggcagaagcagctgcagctgaagcaagaaagaaagcggcaactgaagctgctgaaaaagccaaagcagaagctgagaagaaagcggctgctgaaaaggctgcagctgataagaaagcggcagcagagaaagctgcagccgacaaaaaagcagcagaaaaagcggctgctgaaaaggcagcagctgataagaaagcagcggcagaaaaagccgccgcagacaaaaaagcggcagcggcaaaagctgcagctgaaaaagccgctgcagcaaaagcggccgcagaggcagatgatattttcggtgagctaagctctggtaagaatgcaccgaaaacggggggaggggcgaaagggaacaatgctagccctgccgggagtggtaatactaaaaacaatggcgcaagtggggccgatatcaataactatgccgggcagattaaatctgctatcgaaagtaagttctatgacgcaagctcctatgcaggcaaaacctgtacgctgcgcataaaactggcacccgatggtatgttactggatatcaaacctgaaggtggcgatcccgcactttgtcaggctgcgttggcagcagctaaacttgcgaagatcccgaaaccaccaagccaggcagtatatgaagtgttcaaaaacgcgccattggacttcaaaccgtaatcgcgatgttgactgttcggacggtcaacatcaggcaccggttgccacggggttctggtagttttgtgtattttagtttgttaacattctgctaaattatcgtgggccatcggtccagataagggagatatgatgaagcaggcattacgagtagcatttggttttctcatactgtgggcaagtgttctgcatgctgaagtccgcattgtgatcgacagcggtgtagattccggtcgtcctattggtgttgttcctttccagtgggcggggcctggtgcggcacctgaagatattggcggcatcgttgctgctgacttgcgtaacagcggtaaatttaatccgttagatcgcgctcgtctgccacagcagccgggtagtgcgcaggaagtacaaccagctgcatggtccgcactgggcattgacgctgtagttgtcggtcaggtcactccgaatccggatggttcttacaatgttgcttatcaacttgttgacactggcggcgcaccgggtactgtacttgctcagaacagctacaaagtgaacaagcagtggctgcgttatgctggtcataccgccagtgatgaagtgtttgaaaaactgaccggcattaaaggtgcgttccgtactcgtattgcctacgttgttcagaccaacggcggtcagttcccgtatgaactgcgcgtatctgactatgacggttacaaccagtttgtcgttcaccgtagtccgcagccgctgatgtctccggcgtggagtccagacggttctaaactggcttatgtgaccttcgaaagcggtcgttccgcgctggttattcagacgctggcaaatggcgctgtacgtcaggtggctagtttcccgcgtcacaacggtgcacctgcattcagcccagacggcagcaaactggcattcgccttgagcaaaaccggtagtctgaacctgtacgtaatggatttggcttctggtcagatccgccaggtgactgatggtcgcagtaacaataccgaaccgacctggttcccggatagccagaacctggcatttacttctgaccaggccggtcgtccgcaggtttataaagtgaatatcaacggcggtgcgccacaacgtattacctgggaaggtagccagaaccaggatgcggatgtcagcagcgacggtaaatttatggtaatggtcagctccaatggtgggcagcagcacattgccaaacaagatctggcaacgggaggcgtacaagttctgagctccacgttcctggatgaaacgccaagtctggcacctaacggcactatggtaatctacagctcttctcaggggatgggatccgtgctgaatttggtttctacagatgggcgtttcaaagcgcgtcttccggcaactgatggacaggtcaaattccctgcctggagcccgtatctgtgataataattaattgaatagtaaaggaatcattgaaatgcaactgaacaaagtgctgaaagggctgatgattgctctgcctgttatggcaattgcggcatgttcttccaacaagaacgccagcaatgacggcagcgaaggcatgctgggtgccggcactggtatggatgcgaacggcggcaacggcaacatgtcttccgaagagcaggctcgtctgcaaatgcaacagctgcagcagaacaacatcgtttacttcgatctggacaagtacgatatccgttctgacttcgctcaaatgctggatgcacatgcaaacttcctgcgtagcaacccgtcttacaaagtcaccgtagaaggtcacgcggacgaacgtggtactccggaatacaacatctccctgggtgaacgtcgtgcgaacgccgttaagatgtacctgcagggtaaaggcgtttctgcagaccagatctccatcgtttcttacggtaaagaaaaacctgcagtactgggtcatgacgaagcggcatactccaaaaaccgtcgtgcggtactggtttactaagagaattgcatgagcagtaacttcagacatcaactattgagtctgagcttactggttggtatagcggccccctgggccgcttttgctcaggcaccaatcagtagtgtcggcagtggcagcgtcgaagaccgcgtcactcaacttgagcgtatttctaatgctcacagccagcttttaacccaactccagcaacaactttctgataatcaatccgatattgattccctgcgtggtcagattcaggaaaatcagtatcaactgaatcaggtcgtggagcggcaaaagcagatcctgttgcagatcgacagcctcagcagcggtggtgcagcggcgcaaagtaccagcggcgatcaaagcggtgcggcggcaagtacgacgccgacagctgatgctggtactgcgaatgctggcgcgccggtgaaaagcggtaatgcaaacacggattacaatgcagctattgcgctggtgcaggataaatcccgccaggatgacgcaatggtggcatttcagaatttcatcaaaaattaccctgatagtacttacctgccaaacgccaattattggctgggtcagttaaactacaacaagggtaaaaaagatgatgcggcgtactattttgctagcgtagtgaaaaactatccgaagagtccaaaggctgcagatgcgatgtttaaagtcggcgtcatcatgcaggacaaaggtgacaccgcaaaagcgaaagccgtataccagcaggttatcagtaaataccctggtactgatggcgctaaacaggcacaaaaacgtctgaacgcgatgtaatgcataacacacgaccagaagtcgcattatttctggtcgtgtcgtgcgaatcataagcagttgagtgatctacatcgaaatttttgttgcgctcaagtctgaaatcagtaatatatgccgccgttgccacgggatatcaaacaaaccgaaagcaacgaaaaagtgggtcgttagctcagttggtagagcagttgacttttaatcaattggtcgcaggttcgaatcctgcacgacccaccaatcgctaaggtggaagcggtagtaaaacgtgaaggataacgttgcatgagcaacggcccgaagggcgagacgaagtcgagtcatcctgcacgacccaccactaacatagttagttgtagtatccagcgtagtatcgggtgattagctcagctgggagagcacctcccttacaaggagggggtcggcggttcgatcccgtcatcacccaccaccgggtcgttagctcagttggtagagcagttgacttttaatcaattggtcgcaggttcgaatcctgcacgacccaccagttttaacatcgaagacagatgttaagcgtgtaggataacgttgcgtcagcaacggcccgtagggcgagcgaagcgagtcatcctgcacgacccaccactaatgacggtgggttcggtggaagtagtttgtagtatccagcgcagtatcgggtgattagctcagctgggagagcacctcccttacaaggagggggtcggcggttcgatcccgtcatcacccaccactcgggtcgttagctcagttggtagagcagttgacttttaatcaattggtcgcaggttcgaatcctgcacgacccaccagttttaacatcaaactcagatgttaagcgtgaaggataacgttgcgccagcaacggcccgtagggcgagcgaagcgagtcatcctgcacgacccaccaatcttaaagattggccccgagtaaaaatctttcaggtaacacccgtatgggtcgttagctcagttggtagagcagttgacttttaatcaattggtcgcaggttcgaatcctgcacgacccaccaatttaaaggtggttactggtagagaacgtgaaggataacgttgcgttagcaacggcccgaagggcgagacgaagtcgagtcatcctgcacgacccaccatcctgaatgattaaggcagcataatcccgcaaggggtcgttagctcagttggtagagcagttgacttttaatcaattggtcgcaggttcgaatcctgcacgacccaccaatgtaaaaaagcgccctaaaggcgcttttttgctatctgcgatactcaaagattcgaacctgcagcaggtttgagttgagcgcagcgaaacaacggagccgctcgcggcgacggcccgaagggcgagcgaagcgagtcatcctgcacgacccaccaatgtaaaaaagcgccctaaaggcgcttttttgctattcaggcatcctcaatttcactttgtaaacctgatgacatcgtcagagcttactgtgcaagcaactctatgtcggtggaattaggcgtaaaatgacgcatcctgcacattaggcgtaattcgagtgacttttccccaccattcgactatcttgtttagcatataaaacaaattacaccgataacagcgaatattacgctaatgtcggttttaacgttaagcctgtaaaacgagatggtaagatgagcgtaatgtttgatccagacacggcgatttatcctttccccccgaagccgacgccgttaagcattgatgaaaaagcgtattaccgcgagaagataaaacgtctgctaaaagaacgtaatgcggtgatggttgcccactactataccgatcccgaaattcaacaactggcagaagaaaccggtggctgtatttctgattctctggaaatggcgcgcttcggtgcaaagcatcccgcttctactttgttagtcgctggggtgagatttatgggagaaaccgccaaaattctcagtccggaaaaaacaattctgatgccgacacttcaggctgaatgtagtctggatctcggctgccctgttgaagaatttaacgcattttgcgatgcccatcccgatcgtactgtcgtcgtctacgccaacacttctgctgcggtaaaagcgcgcgcagattgggtggtaactagtagcattgccgtcgaacttattgatcatcttgatagtttgggtgaaaaaatcatctgggcacccgacaaacatctggggcgttacgtgcaaaaacagacgggtggagacattctatgctggcagggtgcctgtattgtgcatgatgaatttaagactcaggcgttaacccgcttgcaagaagaatacccggatgctgccatactggtgcatccagaaagtccacaagctattgtcgatatggcggatgcggtcggttccaccagtcaactgatcgctgctgcgaaaacattgccacatcagaggcttattgtggcaaccgatcggggtattttctacaaaatgcagcaggcggtgccagataaagagttactggaagcaccaaccgcaggtgagggtgcaacctgccgcagctgcgcgcattgtccgtggatggccatgaatggccttcaggccatcgcagaggcattagaacaggaaggaagcaatcacgaggttcatgttgatgaaaggctgcgagagagggcgctggtgccgctcaatcgtatgctggattttgcggctacactacgtggataacgaataataaggcgtaacgttacgctttgggggaaagatggatttttttagtgtgcagaatatcctggtacatataccaataggggcaggcggttatgatctcagttggatcgaagcggtaggcacgatcgccgggttgctgtgtattggccttgccagtctggagaagatcagcaactacttctttggcctgatcaacgtcaccttgtttggcattattttctttcagattcagctgtatgccagcctgctattacaggtgtttttctttgccgcgaatatttacggttggtatgcgtggagccgacaaaccagtcagaacgaggcggagttgaaaattcgctggttgccattgccgaaggcactcagctggttggcggtttgcgttgttagcattggtctgatgacggtatttatcaatccggtgtttgcatttttgacccgcgtggcagtcatgatcatgcaagcattaggattacaggttgtgatgcctgaactgcaaccggacgctttcccgttctgggatagttgcatgatggtgttatctatcgtggcaatgattctgatgacgcgtaagtatgtggaaaactggctgttgtgggtgattattaacgtgattagcgtcgttatttttgcacttcagggcgtttacgccatgtctctggagtacatcatcctgacctttattgcgctcaacggcagccggatgtggatcaacagcgcacgtgaaagaggcagtcgcgcgctgtcccattaatggtgatgatgactatggccagacaccccttcattcaggtggcagtctggcccatgacaaggttgatattccatctgaatggtggcgtgctcaatctgatagtgatccatcaggtagtgttggatctgatccaacaaggcatcgtgatcgtgtggcgggatcacctgcacatgcaacgtcatcaccggcttctcgcctaccatccatacatgtacatggtgcacattgcggacttccgggatttcccggcacatacgacgcttcagttcagcgatatccaggcttaccggtgcaccttcaagtaattcattcacgctatctttcaacagtcgccacgcgctacgcagaaccagaaggctcaccagtatgctgagaatggggtcagcaggtgtccagccagtccagataataatcaacgcggcaataatagccccaacgctacccagcaggtccccgagcacatgcagtgccgctgctcgtacgttgaggtttttctcttcgctgccgtgatgaagtaaccagaaagaaagtatatttgccagcaacccagccacggcaattgccatcatcatgccgccctcgaccggacgcggcgtgcggaagcgttctatcgcctcccagacaatcaaaatggtaattaccacgagggctatggcattcacaaacgccgcgagcgtggtcagtcttagccaaccgaaagtgtggcgaatggtgggaggacgacgactaaattgcacggcgagtagggcgaaaagcagggcggcagtatcggtcaacatatgacccgcatcggccagcaatgccagagaaccagaaagaaaaccaccaacgacttctaccagcataaacccggcagtcacgccgaaagcatacaacaagcgacgagcattattatcttctggcaggtgactggacgtgtgactgtgactgtgcgccatgacgagtcatcccttaattattctcacttaactttatgacatcatactgcttttagaagtgaaaaattaaaagggagagactccgctctcccattattggctattttgcagggttactgcgtggtaccgtcggttttggtatcgacatcattattgatgccatcaccggtttgtacctttttattgatatccggacagcgaccatctttgcacatggtgttcttgtgctcttcatctttggtcattccgtcattgttcatactagaaccatcgctatgcagcattgtgccgccagaaccggtatttaccccgttattgtcgacgttatttggcgcgacattttcacgggcgtcaggggctacctggcccgcatcagctgcggcgtttgcctggccgttattagtttgcgctccgctatcggcagccagtgcggcaccgctggcaaggcttagagtggcagtcagaaataatgtggccagttttgtcattttcataggatgctcctgttatggtcgttatgtcggataacctcttccaacagtgcatttgcaggtgaatataaggcattggtttaagatttcagccaggttatgaaacgcagcagagaatcttgaaataattaacaaacaaaggagttacagttagaaattgtaggagagatctcgtttttcgcgacaatctggcgtttttcttgctaattccaggattaatccgttcatagtgtaaaaccccgtttacacattctgacggaagatatagattggaagtattgcattcactaagataagtatggcaacactggaacagacatgaattatcagaacgacgatttacgcatcaaagaaatcaaagagttacttcctcctgtcgcattgctggaaaaattccccgctactgaaaatgccgcgaatacggttgcccatgcccgaaaagcgatccataagatcctgaaaggtaatgatgatcgcctgttggttgtgattggcccatgcagtattcatgatcctgtcgcggcaaaagagtatgccactcgcttgctggcgctgcgtgaagagctgaaagatgagctggaaatcgtaatgcgcgtctattttgaaaagccgcgtaccacggtgggctggaaagggctgattaacgatccgcatatggataatggcttccagatcaacgacggtctgcgtatagcccgtaaattgctgcttgatattaacgacagcggtctgccagcggcaggtgagtttctcgatatgatcaccccacaatatctcgctgacctgatgagctggggcgcaattggcgcacgtaccaccgaaagccaggtgcaccgcgaactggcaagtgggctttcttgtccggtcggcttcaaaaatggcaccgacggtacgattaaagtggctatcgatgccattaatgccgccggtgcgccgcactgcttcctgtccgtaacgaaatgggggcatagcgcgattgtgaataccagcggtaacggcgattgccatatcattctgcgcggcggtaaagagcctaactacagcgcgaagcacgttgctgaagtgaaagaagggctgaacaaagcaggcctgccagcacaggtgatgatcgatttcagccatgctaacagctccaaacaattcaaaaagcagatggatgtttgtgctgacgtttgccagcagattgccggtggcgaaaaggccattattggcgtgatggtggaaagccatctggtggaaggcaatcagagcctcgagagcggggagccgctggcctacggtaagagcatcaccgatgcctgcatcggctgggaagataccgatgctctgttacgtcaactggcgaatgcagtaaaagcgcgtcgcgggtaaggtttaattgtcggatgcgccgtcagagtggcgtatccgatgaatcaccacaggcctgataagtcgcgcagcgtcgcatcaggcaatgtgctccattgttagcaacaaaaaagccgactcacttgcagtcggctttctcattttaaacgaatgacgtttacttcgctttaccctggtttgcaaccgccgctgctttcgctgcgatctcgtcagcattacccagataatagcgtttcagcggtttgaaattctcgtcgaactcatacaccagcggcacgccagtcgggatattaagctcaagaatctcttcttcgctcatgttatcaagatatttcaccagcgcacgtaaagagttaccgtgtgcagcgatgatcacgcgctcaccgctcttcatacgcggcagaatagtttcattccagtaagggatcacgcggtcaatggtcagcgccaggctttccgtcagcggcagttctttctcgctcagtttcgcgtaacgcggatcgtgacccggataacgctcatcatctttagtcagttccggcggagtcactgcaaaaccacgacgccactgtttcacctgctcgtcgccatacttttcagcagtttccgctttgttcagaccctgcaacgcaccgtagtgacgttcgttcagtttccaggatttctcaacgggcagccatgcctgatccagttcgtccagcacattccacagggtatggatagcgcgtttcagcacagaagtgtaagcaaagtcaaagctgtaaccttcctctttcagcagcttacctgctgcttttgcttcgcttacgcctttctcagacagatccacgtcgtaccaaccggtgaaacggttttctttgttccactgactttcgccatgacgaaccagaaccagcttagttacagccatatacttactcctcaaatcatcttttaatgataataattctcattatattgccgcgacgaagcaacagcaatgcttacgcataaccatagcgaaaatagtggcgcagtgtaaggttgttgtgaatattgagttgcaaatatgtcggtgtttgctggtgatttgaacaatatgagataaagccctcatgacgagggcgtaacattactcagcaataaactgatattccgtcaggctggaatactcttcgccaggacgcaggaagcagtccggttgcggccattcagggtggttcgggctgtccggtagaaactcgctttccagagccagcccttgccagtcggcgtaaggttcggttccccggctcggtgtgccgccgaggaagttgccggagtagaattgcagagccggagcggtggtgtagaccttcagctgcaatttttcatctgcactccagacatgcgccgccactttcttgccatcgcctttggcctgtaacaagaatgcgtgatcgtaacctttcactttgcgctgatcgtcgtcggcaagaaactcactggcgatgattttggcgctgcggaaatcaaaagacgttccggcgacagatttcaggccgtcgtgcggaatgccgccttcatcaaccggcagatattcgtccgccagaatctgcaacttgtgattgcgcacgtcagactgctcgccgtcaagattgaaatagacgtgattagtcatattcaccgggcaaggtttatcaactgtggcgcgataagtaatggagatacggttatcgtcggtcagacgatattgcaccgtcgcgccgagattacccgggaagccctgatcaccatcatcactactcagggcaaacagcacctgacgatcgttctggttcacaatctgccagcgacgtttgtcgaacccttccggcccgccgtgcagctggttaacgccctgacttgggctaagcgtcacggtttcaccgtcaaaggtataacggctattggcgatacggttggcataacgaccaatagaggcccccagaaacgcggcctgatcctgatagcattccgggctggcacagccgagcagcgcctcgcggacgctgccatcggaaagcggaatacgggcggaaagtaaagtcgcaccccagtccatcagcgtgactaccatccctgcgttgttacgcaaagttaacagtcggtacggctgaccatcgggtgccagtgcgggagtttcgttcagcactgtcctgctccttgacttggtttacaaacgtaaaaagtctctttaatacctgtttttgcttcatattgttcagcgacagcttgctgtacggcaggcaccagctcttccgggatcagcgcgacgatacagccgccaaatccgccgccggtcatgcgtacgccacctttgtcgccaatcacagctttgacgatttctaccagagtgtcaatttgcggcacggtgatttcgaaatcatcgcgcatagaggcatgagactccgccatcaactcgcccatacgtttcaggtcgccttgctccagcgcgctggcagcttcaacggtgcgggcgttttcagtcagtatatgacgcacgcgttttgccacgatcgggtccagttcatgcgcaacagcgttgaactcttcaatggtgacatcacgcagggctggctgctggaagaaacgcgcaccggtttcgcactgttcacgacgggtgttgtattcgctgccaaccagggtacgtttgaagttactgttgatgatgacgacagccacacctttgggcatggaaactgctttggtccccagactgcggcaatcgatcagcaaggcatgatctttcttgccgagcgcggaaattagctgatccatgatcccgcagttacagcctacaaactggttttctgcttcctgaccgttaagcgcgatttgtgcgccgtccagcggcagatgataaagctgctgcaatacggttccgaccgcgacttccagactagcggaagaacttaacccggcaccctgcggcacattgccgctgatcaccatgtccacgccgccgaagctgttgttacgcagttgcagatgtttcaccacgccacgaacgtagttagcccattgatagttttcatgtgcgacaatgggcgcatcgagggaaaactcgtcgagctgattttcataatcggctgccatcacgcgaactttacggtcatcgcgtggtgcacaactgatcacggtttgataatcaatcgcgcagggcagaacgaaaccgtcgttgtagtcggtgtgttcaccaatcaaattcacgcggccaggcgcctgaatggtgtgagtggcagggtagccaaatgcgttggcaaacagagattgtgttttttctttcagactcatttcttacactccggattcgcgaaaatggatatcgctgactgcgcgcaaacgctctgctgcctgttctgcggtcaggtctcgctgggtctctgccagcatttcataaccaaccataaatttacgtacggtggcggagcgcagcagaggcggataaaagtgcgcgtgcagctgccagtgttgattctcttcgccattaaatggcgcgccgtgccagcccatagagtaggggaaggagcactggaagaggttgtcataacgactggtcagctttttcaacgccagcgccagatcgctgcgctgggcgtcggtcaaatcggtgatccgtaaaacgtgggctttgggcagcagtagcgtttcgaacggccaggcagcccagtaaggcacgacggctaaccagtgttcggtttcgacaacggtacggctaccgtctgccagctcgcgctgaacataatccaccagcattggacttttctgttcggcaaaatattctttttgcaggcggtcttcgcgctcagcttcgttaggcaggaagctatttgcccaaatctgaccgtgcggatgcgggttagagcagcccatcgccgcgcctttgttttcaaaaacctgcacccatgggtacgttttccccagttctgcggtttgctcctgccaggttttgacgatttccgtcaatgctgcaacgctgagctctggcagcgttttactgtgatccggactaaagcagatcacccggctggtgccgcgcgcgctctggcaacgcatcagcggatcgtgactttctggcgcatctggcgtgtcagacatcaaagccgcaaagtcattagtgaaaacgtaagtcccggtgtaatcggggtttttatcgcctgtcacccgcacattacctgcgcagaggaagcaatctggatcgtgcgcaggtaacacctgtttggctggcgtttcctgcgccccctgccaggggcgcttagcgcggtgcggactaaccagaatccattgcccggtgagcgggttgtagcggcgatgtggatgatcaacgggattaaattgcgtcatggtcgttccttaatcgggatatccctgtggatggcgactctgccagtgccaggtgtcctgcgccatttcatcgagtgtgcgcgttacgcgccagttcagttcacggtcggctttgctggcgtccgcccagtaggccggaaggtcgccctcgcgacgcggtgcaaaatgataattaaccggtttgccgcaggctttgctgaaggcattaaccacgtccagcacgctgttgcctacgccagcgccgaggttgtagatgtgtacgcctggcttgttcgccagtttttccatcgccacgacgtgaccgtccgccagatccattacgtggatgtaatcgcgtacgccagtaccatcttcggtcggataatcgttaccaaaaatcgccaggctgtcgcgacggcctacagcaacctgggcgatgtatggcatcaggttattcggaatgccttgcggatcttcgcccatatcgccgctcggatgcgcgccaaccgggttgaagtagcgcagcagggcaatgctccagtccggctgggctttttgcagatcggtgaggatctgttccaccatcagcttgcttttgccgtaagggctttgcggtgtgccggtcgggaagctttcaacgtatggaattttgggctgatcgccataaacggtggcggaggagctaaaaataaagtttttgacgttagcggcgcgcatggcgctaatcaggcgcagagtgccgttgacattgttgtcgtaatattccagcggtttttgtacgctttcgcccacggctttcagcccggcgaagtggatcacggtgtcgatagcgtgatcgtgcaggatctcggtcatcaacgcttcgttacgaatatcgccttcaacaaacgttggatgtttgccgcctaaacgctcgataacaggcagtacgatgcgcttactgttacagaggttatcaagaatgatgacatcatgaccgttttgcagtaattgcacacaggtatgacttccaatgtaaccgctaccaccggtaaccagaactctcataattcgctccattaggcttatggtatgaaataaccatagcataacaaagatgcgaaaagtgtgacatggaataaattagtggaatcgtttacacaagaatttagccgttttttatgcgcgattaagtgattataaaacagagggtttatgaatgattgcgctttttatctgaaaaaagacgcggtttcatgcctgcatgcgtcgaaccgttggccggagagggtgctaaggccgcctccggcaaggtcagcactaccgactcaatatatttttgtcagcacatagcgatagagtccaccgtccggcacgaactcaagacgatgggtaatacaggcaggcgcatcttcagcgtggtggctaacaaacaacaattgcgtttcaccttcgctaatcagcacatcaacaaaacggcggataagctggcgattcagcggatcaagcccctgtagtggttcatcgagaataagcaacgtcggatgtttcaccagtgcgcggacaatcagcgccagacgctgctgtccccaggaaagactatggaacggagcgtcagccgtgcgtttatcaatgccgagaatatccagccactgctgcaccagtttttgctggcgatcgctaacggcctgataaatgccaatgctatcaaaatagccagaaagaatcacattacgcacggtagtgctgacccggtaatccagatgcaaactactgctgacgtaaccgatatgctttttgatatcccagatggtttcgccgctgccgcgacgtcgtccgaaaagcgtcaaatcgttgctgtaaccttgcggatgatcgccagtaaccaggcttaataacgtgctttttcctgcaccatttggcccgacaatttgccagtgttcgcctggattcacctgccagctaaggttattaagaatggggcgatcgttataagaaaccacgccattgttcagcacaatgcgcggttcgttggcgggtaaggcgtgacgtgcactaggttcatccggctccggcagttgcacaccttcaagctgttcactatgcgccagttgcgcgacgagtgcttgttggagcagttcctctttagcgccagtttccgctaacgtgcaatccgccagcacgccagcaaactggacaaactccgggatctcatcgaagcgattgagcaccagtaccagagtaataccggactgatgtaagctggcgagtcgctcagccagctgctgacgactggcaacatccaggccatcgaacggctcatcaagaatcaacaagtcaggctcgctcatcagcgcctgacacagcagggtttttcgcgtctcgccagtggaaaggtatttaaagcgtcggtcgaggagggcggtaataccgaactgctgcgccagttgcatgcaacgcggtgcatcctttacttcatcctgaatgatctcagccgtagtgcgtccggtgtcatcttcgccagggccgagcatatcggtgttattccgctgccattcgtcgctgacgagtttttgcaattgctcgaaggagagacgagtgatgtgggaaaactggctttgccgttcacctttcaaaagcggaagttcccccgccagcgcgcgggccagggcgcttttcccgcttccattgctaccgacaaacgcccaactatcacccgcgtttaacgttagctgaggcaattgcagcgtttttgtgtcgctaagacgaaacgtgccttgcaaaatttgcaagctactcattttatatcccactttgtgcagcgattactgacagggatacgtgtttcataacaaattgtcaacacgcttagcacagcgtggcgataatcacgctgtcggcattaaagtaggccgtgacattctgtccttgctgaagagaagtcgcttcatttaccggcactgtggcgcacagtgtttgcccgtcgggtagcgccattaatacttcgcactgctctgcgccgcgctcaatatgactaataatacccggtaattggttgtcagcgttttgcgcgaccgcctcgtcctgagtaatacctacccacggcgcttttagcaatatcaacacttctttgccttcatccagccccagacgcgcgccgctttgtgcggtaattgcgactttcaggcgtgtttttccgtcagccagtaagacatcaacatgctgttgaacgtcatcatgatcgcgggcggtgatggtaccgaaccactggttacgggcgctggtttgcagactaaaacgactgatcgcggccagcaggctgttcagcggcagggcgtcatcgtcacttaacacatcaaaggctttttgctggatttgcgccagtaagtcatagagctgaatcagtcgctgaccatagcgggtcagtactgcgccgccgccacctttaccgcctgttgcgcgctcgaccagaatatgctcacttaactgattcatctcgttaatggcatcccaggcgcttttatagctaataccggcatctttcgctccctggctaatggaaccggaaagcgcaatgtgttttagtaggctaatgcggcgcgggtcggcgaataatttttgttggagcttaagggtgagaaggatttcggcctgcataacaatgtcctggcaaaagtcttattgtgacggaaaacgaacgccacgcaaagctgaccgcacaaaaggggagtgcttttctgtgcttagcggttagaatagtctcatgactatatctggagttgaccatgttagagttattaaaaagtctggtattcgccgtaatcatggtacctgtcgtgatggccatcatcctgggtctgatttacggtcttggtgaagtattcaacatcttttctggtgttggtaaaaaagaccagcccggacaaaatcattgattccctgaatgcccgcttagtcgggcattttctttttctcaacttcctgcttttcctgccgatattttttcttatctacctcacaaaggttagcaataactgctgggaaaattccgagttagtcgttatattgtcgcctacataacgttacattaaggggttaccaatggctcgtaaatggttgaacttgtttgccggggcggcactctctttcgctgttgctggcaatgcactggcagatgaagggaaaatcacggtgttcgccgccgcaagtctgactaacgcaatgcaggacattgctacgcagtttaaaaaagagaaaggcgtggatgtggtttcttctttcgctagcagttctactctcgcccgtcagattgaagcgggtgcgcctgcggatctgtttatttctgccgatcagaaatggatggattatgcggttgataaaaaagcgatcgatacagctacgcgtcagacactgctcggcaatagcctggtcgttgtagcaccgaaagccagcgtgcagaaagatttcaccatcgacagcaaaaccaactggactagtctgctgaatggcggtcgcctggcggttggcgatccggaacatgttcccgctggcatttatgcaaaagaagcactgcaaaaactgggcgcatgggatacgctctctccgaaactggccccagcggaagatgttcgtggggcgctggcgctggtcgaacgtaacgaagcgcctctgggcattgtctacggttctgacgcagttgccagcaaaggggtaaaagtggttgccaccttcccggaagatagtcataaaaaagtggaatatccggttgctgttgtggaagggcataacaatgcgacagtgaaagcattttatgattatctgaagggaccgcaggcagcggaaatctttaaacgttacggatttacaatcaagtaatgatactgaccgatccagaatggcaggcagttttattaagcctgaaagtttcttccctggctgtgctgtttagcctgccgtttgggatcttttttgcctggttactggtgcgttgcacgtttccgggcaaagctctgctcgacagcgtactgcatctaccgctggtgttaccgcccgtggtcgtcggttacttattattagttagcatgggacggcgcggatttatcggtgaacgtctgtatgactggtttggtattaccttcgcctttagctggcgcggcgcggttctcgctgccgccgtcatgagctttccgctgatggtgcgggcaattcgtctggcgctggaaggggttgatgtcaaactggaacaggccgcaagaacactgggggccgggcgctggcgcgttttctttactatcacgttaccgctgaccttaccgggaattattgttggtacggtactggcttttgctcgttctctcggtgagtttggtgcaaccatcacctttgtgagcaacattcctggtgaaacgcgaaccattccttctgccatgtataccctgatccagacccccggcggggaaagtggagcggcgagactgtgcattatttctattgcgctggcgatgatctccctgttgattagtgaatggctggccagaatcagccgtgaacgggcggggcgctaatcatgctggaactgaatttttcccagacgttgggcaaccattgcctgactattaatgaaacgctgcccgccaatggcatcactgctatctttggcgtctccggtgccggaaaaactagcctgattaacgccatcagtggactgacgcgcccgcaaaaagggcggattgtcctcaatgggcgggtactaaatgatgccgaaaaaggtatctgcctgacgccggaaaagcgtcgcgttggctatgtttttcaggatgcgcggctgttcccgcattacaaagtgcgtggcaatctgcgctacggcatgagcaaaagtatggtcgatcagttcgataagctggtggcgcttttaggcattgaaccgttgcttgaccgtttaccaggcagcctgtccggaggcgaaaaacagcgcgtggcgattggtcgggctttgctgacagcaccggaattgctgttgctggatgaaccgctggcgagtctggatattccgcgtaaacgcgaactgttgccttatctgcaacggctgacacgggaaatcaacattccgatgttgtatgtcagccatagcctggatgagatcctccatctggcagacagagtgatggtactggaaaacggtcaggtgaaagcctttggcgcgctggaggaagtgtggggcagtagcgtgatgaatccgtggctgccgaaagagcaacaaagtagcattctgaaagtgacggtgcttgagcatcatccgcattacgcgatgaccgcgctggcgctgggcgatcagcatttgtgggtcaataagctggacgaaccgctgcaagctgcgctacgtatccgcattcaggcttccgatgtttctctggttttacaaccgccgcagcaaaccagcattcgtaacgtattgcgggcaaaagttgttaatagttatgacgacaacggccaggtggaagtggaactggaagtcggcggtaaaacgctgtgggcgcgtatcagcccgtgggccagggatgaactggcgatcaaacctggcctgtggctgtacgcgcaaattaaaagtgtgagcataaccgcctgattaaatcaggtggctataaatgaactgggcaatgctgtcggtggtgttatcaccaatcacaatgttggcgcgcgcttttaccgcgtcatcggcgttgcccatcgccacgcctgtaccagcggcttccagcatactgatatcattaaagttatcgccgaatgccacgacgttttccatgctccaaccttgcgcctcaacccatttcgtcaaacgtttacctttgctgttgccgccgcgtgcaatatcaacctgatcgtgccaggaccattcacactccagtcccagttcatgttcgacatgcttaccaaaatgctgcaattgcggcaggtcatcgtgcgtcagggcgaacttccatacggcgttaacttgttgcgccgtttcagccagagaagcgacttgtgtgaaagtcggacgctgttccggcggcagggtttgcgcccagttagatgtgcgaatgacatgcccggtcgggtgctcatagaccattgcatcatcgacatacatcagaccgtgaatgtggtgttcattcagcatctcaatgagttgcagggctttaataacgggcattgggtccgcttccagcacggtttttgcatgataatcatacaaataggtgccattacagcaaatagcaggtgtatccagcgccagcgcctgataaaaaggatgaatagcgacgtgatggcgacctgtgacgatgattaattgatagcctgcttcgcgagcgcgggccagggcttctatgctactaggaagcagggtctttttcggggtcaataaggtgccgtctaagtcgagagcaatcacgcgtgtggtcatggcgtattccagattaaggttaagaattttcgtctgcgcgaatggtacaccgataccactatcggacaaaattctgcgttttaattcagcattcaccgccaaaagcgactaattttagctgttacagtcagttgctaaatgcaaaggagcattcatgaagcaaacagtttatatcgccagccctgagagccagcaaattcacgtctggaatctgaatcatgaaggcgcactgacgctgacacaggttgtcgatgtgccggggcaggtgcagccgatggtggtcagcccggacaaacgttatctctatgttggtgttcgccctgagtttcgcgtcctggcgtatcgtatcgccccggacgatggcgcactgacctttgccgcagagtctgcgctgccgggtagtccgacgcatatttccaccgatcaccaggggcagtttgtctttgtaggttcttacaatgcgggtaacgtgagcgtaacgcgtctggaagatggcctgccagtgggcgtcgtcgatgtggtcgaggggctggacggttgccattccgccaatatcagtccggacaaccgtacgctgtgggttccggcattaaagcaggatcgcatttgcctgtttacggtcagcgatgatggtcatctcgtggcgcaggaccctgcggaagtgaccaccgttgaaggggccggcccgcgtcatatggtattccatccaaacgaacaatatgcgtattgcgtcaatgagttaaacagcagtgtggatgtctgggaactgaaagatccgcacggtaatatcgaatgtgtccagacgctggatatgatgccggaaaacttctccgacacccgttgggcggctgatattcatatcaccccggatggtcgccatttatacgcctgcgaccgtaccgccagcctgattaccgttttcagcgttagcgaagatggcagcgtgttgagtaaagaaggcttccagccaacggaaacccagccgcgcggcttcaatgttgatcacagcggcaagtatctgattgccgccgggcaaaaatctcaccacatcagcgtatacgaaattgttggcgagcaggggctactgcatgaaaaaggccgctatgcggtcgggcagggaccaatgtgggtggtggttaacgcacactaaccgctgatttacccggcgcagtctctcctgcgccggtgtattaacctatctcctgtaacgcgtgtctctggcgttcgacgatattggtccacaaattgtctttatcgtcagtccataaattaatcagcaaggcaaaaaagcgttctgctgctggagaaagtacggcatctttacggcgaattattcccaatgttcgacgtataacgggttccaccaatgggataccaataatgctagaatagggcgcatgaggcattgccaggccaggaagcgcgctaatccccagtcccgcctccaccagtcctaaactcgtgctaagatgacgcacttcgtaaaaccagtccagcttccagggcttgtcggccagctgttgttctatcaacagtcggttgccgctggaggagcgtacgccaatcattttgtaacccactaactcctgccattctacaagctgctttttggccaatggatggtcacgccgacaggccagcacgaacggctcgttgaccagtggggtaaaatcaatggaactatttgtgacgttgttcatgtttatgccaaagtcactttcgttacacagcacgctttccatgcaattattcgtgccttgttccagaatccgcactttaatattgggatacagctcattaaatttaccgattgccagcggtaaaaaataaaatactgcggtcggaatacacgctaacgtcaccataccacgatgataagcattcatatcacgaatattaaaaagcgtttcatcgaatttctttattaattcccgcgcctccgggagcaacctttttcctgcttttgttaacgtaaccttgcgagttgtacgctcaaatagttgaacatgtaaatcttcctccatcttttttattcttcgcgttaatgcaggttgcgtaatattgagtaatttagcggcattgttaaagctactggactctgccagtatgacaaatgccttcatactacttaattcatgcttcattattactccggaaaatggaaggctgctttttgggtggctggccgttaaaaattttaactgcatttagccaacttaaattaatgaaaaaatgttattaatcgttgagctaaagtcattagagatgctttgcccttaatgtaaccatatcgcaataagttatgtttttaaattgagggcattattatgaaaaaaataccctgcgtgatgatgcgaggtggaaccagcaggggcgcgttcctgttagcggaacatttacccgaagatcaaacgcagcgcgataaaatattgatggcaattatgggttccggtaacgatctggaaattgacggtattggcggcggtaatccactgaccagtaaagtcgccattattagccgttccagcgatccgcgtgctgatgtcgattatctgtttgcgcaggtaatcgttcatgagcaacgtgtcgataccacgcctaactgcggcaatatgctgtctggtgttggggcattcgccattgaaaatggtttgattgcagcgactagcccagttactcgcgtacgtatccgcaacgtcaatacgggtacgttcatcgaagctgatgtgcaaacgccaaatggtgttgtcgagtacgagggtagcgccagaattgacggcgtaccgggtactgccgcaccggttgcgctcactttcctgaatgccgctggaaccaaaaccggaaaagttttcccgactgataatcagattgattattttgacgatgtcccggtgacctgtatcgatatggcgatgccagtcgtcattattccggctgaatatctgggaaaaacaggttatgaattaccggcggaactggatgccgacaaagcattattagcccgcattgaatctatccgtctacaagcgggtaaagcaatgggcttaggtgatgtcagtaatatggttatccctaaacctgtgcttatttctccagcgcagaaaggcggggcaattaatgtgcgttattttatgccgcattcttgccatcgcgcgctggcgataaccggtgctattgctatttccagtagttgtgcattggaaggcaccgtcacccgacaaatcgtcccttctgtaggatacggcaatatcaatattgaacaccccagtggtgcgctcgacgttcatttaagtaatgaaggtcaggatgccacgacgttacgcgcatctgttattcggacgaccagaaaaatattttccggtgaagtttatcttccctgaaaaaattcgttgtcaggataaggacaatcaataaaggacttctgtatgagtcatacagaaagaacaggattttaaatgaataagaaaagcttatggaagctaattctgatattagcgatcccatgtattattggttttatgccagctccggcaggattaagcgaactggcgtgggtgctttttggtatttacctggcggccattgtggggctggttatcaagcctttcccggaacctgtcgtactgttaattgccgttgctgccagtatggtggtggtcggtaacttatccgacggtgcgtttaaaaccaccgccgtattaagcggttactctagtggtaccacctggctggtgttcagcgcgtttaccttaagcgccgcatttgtgaccaccggtttaggtaaacgtattgcctatctgctgattggtaaaatcggtaacaccacgctgggtctgggttacgttacggtattcctcgatctggtactggctccggcaacaccgtctaacaccgcgcgtgcgggcggcattgtgttaccgatcatcaacagcgtggcggtggctttggggtccgaaccggaaaaaagtccgcgtcgtgtcggacattacctgatgatgtccatttacatggtcaccaaaaccaccagctatatgttctttaccgcaatggcggggaacattctggcgctgaaaatgatcaacgacattctgcacctgcaaattagctggggtggatgggcgctggcagccggattgccgggcatcattatgctgctggtcaccccgctggtgatttacaccatgtatccaccagaaattaagaaggtggataacaaaaccatcgctaaagcgggccttgccgaactaggaccgatgaaaatccgcgaaaaaatgctgctcggtgtctttgtgctggcgctgctgggctggattttcagtaagtctctgggggttgatgaatccaccgtggcaatcgttgttatggcaaccatgctgctgctgggtatcgttacctgggaagacgtggttaaaaataaaggcggctggaataccttaatctggtacggcggtattatcggcttaagctccttattaagcaaagttaaattcttcgaatggttagctgaagtctttaaaaataacctggcatttgatggtcacggtaacgttgctttcttcgttattattttcctcagcattatcgtgcgttatttcttcgcttccggtagtgcctatatcgttgctatgttaccggtatttgccatgctggcgaacgtctccggcgcaccgttaatgttaaccgcgctggcactgttgttctccaactcctatggcggcatggttactcactatggcggcgcggcaggtccggtcatctttggcgtgggttataacgatattaaatcctggtggttggtcggtgcggtactgacgatattaaccttcctggtgcatatcaccctcggcgtgtggtggtggaatatgctgatcggctggaacatgctgtaaatattctcgtcatacttcaagttgcatgtgctgcgtctgcgttcgctcaccccagtcacttacttatgtaagctcctggggattcactcgcttgtcgccttcctgcaactcgaattatttagagtatatccatttattatctttctgcgcacttcacggtgcgcagatatctggagcatttgatgatcaagttatctgaaaaaggcgtgtttctcgccagtaataacgaaataattgccgaagaacatttcaccggcgaaattaaaaaagaagaagccaaaaaaggcactattgcctggtctattctctctagccataatacgtccggaaatatggataaacttaaaattaagtttgatagtttagcctctcacgatattacctttgttggtattgtacagaccgctaaagcgtccggtatggaacgtttcccgctgccgtatgtgctgaccaactgccataacagtctctgcgccgtcggcggcactattaacggtgatgaccatgtttttggtttaagcgcggcccagcgttatggcggtatttttgtgcctccgcatattgcggtcatccatcaatatatgcgtgagatgatggcaggcggcggcaaaatgatcctcgggagtgacagccacacccgttacggtgcattagggacaatggcagtcggtgagggcggcggtgagttggtaaaacagctgcttaatgacacctgggatatcgactatccgggcgtggttgcggtgcatctgaccggaaaacctgcgccgtatgtggggccacaggatgtggcgctggctatcattggcgcggtgttcaaaaacggttacgtcaaaaacaaagtcatggagttcgttggaccgggcgttagcgcgctctctaccgatttccgtaacagcgttgacgtgatgaccactgaaacgacctgtttaagttctgtctggcaaaccgatgaagaagtccataactggctggcgctgcacggtcgcggccaggattactgccagcttaaccctcaaccgatggcgtactacgatggctgcatcagcgttgatttaagcgccatcaaaccaatgattgcgctgccgttccacccgagcaacgtgtatgaaatcgacacactgaaccagaacctgaccgacattctgcgtgagattgaaattgagtccgaacgcgtggcgcacggtaaagccaaactcagcctgctggataaagtggaaaatggtcgcctgaaagtgcagcaggggattatcgcgggctgttctggcggtaactacgaaaacgtcatcgcggcggcgaatgcactgcgcggtcaatcctgtggcaatgacaccttcagcctggcagtttacccgagtagtcagccggtgtttatggatctcgccaaaaaaggtgtggtagcagatttgattggcgcaggcgcaatcatcagaaccgcgttctgcggcccatgctttggcgcgggcgatacgccaatcaacaacggtttgagtattcgccacaccacgcgtaacttcccgaaccgcgaaggctctaagccagctaatgggcagatgagtgcggtggcgttgatggacgctcgttctatcgctgcgactgcggcaaacggtggctatttaacctctgccagcgaacttgattgctgggacaacgtgccggagtacgccttcgatgtaacgccgtataaaaaccgtgtttatcagggctttgtgaaaggggcaactcagcaaccgctgatttacgggccgaacattaaagactggccggaattgggtgcgctgactgacaatatcgtcctgaaagtgtgcagcaagatcctcgacgaagtgaccaccaccgacgaactgattccttccggtgaaacctcttcttatcgtagtaatccgattggtctggcggagtttaccctgtctcgccgcgatcccggttatgttagcagaagtaaagcgactgctgagctggaaaatcagcgtctggcggggaatgtcagcgagctgacagaggtgtttgcgcgcattaagcagattgctggtcaggagcatattgatccgctgcaaactgaaattggcagcatggtctatgcggtgaaaccaggcgatggttctgcgcgtgaacaggcggcgagctgccagcgtgtgattggcggtctggcgaatattgccgaggagtacgcgactaaacgctatcgttctaacgtcatcaactgggggatgttaccgctgcaaatggcggaagtaccaacctttgaagtgggggattacatttacatccctggcattaaagcggcgctggataatccgggtacgacgtttaaaggttatgtgatccatgaagatgcgccggtaacggaaattacgctctatatggaaagtctgactgctgaagagcgcgagattatcaaggcgggtagtttgattaacttcaataaaaaccgtcagatgtaaaaagcgccatgtgaatgtaggtcgcattcggcacttattgtcggatgcgatgcttgcgcatcttatccgacctacgaatcgcatcgaatctgtaggccagataaggcattttcgcagcatccggcacttattgtcggatgcgatgcttgcgcatcttatccgacctacaaatcgcatcgaaccgtaggccggataaggcgtttacgccgcatccggcaaatagttaattgcccttacttcttcgcctctgcaaccactttactacccacgccgcggttattgtattcccacatgcggttgtagttagtgtcattcagattgcgctgtatttcgtcgttatcatctacgctgccggtattacccgcaaacggacgattagagatcaccgcatcggcccacggtttagccgtgttaaaaccttcgttgatggcgctatcacggatcaccacctgaccgttggtattggcatcaacatccaggctgcggcccagttgcgccacaccatcaccgaaagcattgaaacggctgtttacggcgaggaaaccgtagtaaatgttggacagcgtagccggtgcaaacacatacgcttcttgctgagtacgactgttcaccacgcggaattcggtgttatcgaacaccactgcgccgcgaccagaaacgatatccacatccccttcaatgtagctgttggtcaccagcgtacgcggctgacgattcgtttccagacggttctgcacaccgctgttggtgacaaagaaggtgttctgacgaccgagaatgttaacgttgttaatctgtacctggtcaccatcagtacgcagtgccaccgccggatggttacctgcatctacgctatcgcccagcgtgttttcgatggtcagattttgcagttgcaggccattgttttgactccagaagaccgcagagcagagaacaccgatactgtcgctgcgtttgctctggcagctatcgtacatataccacgctggtttacctggcatatatttgccgcgcgggttgacgtcgtgacgccagtcggcagggctcatgccaccatcaagggaaagcccaatcttcacatcaatcggtttttcacctgtaccgtacagagtaattccacccggagcggcagggacatataccgttccctgatactcaccaggcatcacggcaatatactggcgcttgttggtacgcttgataattgccgcatctaccgccgcctgaatcgtggtatgcgttacaccttgagtgcccgccgggccgacaacaaagtcaggttgcgcaggcagggtaatcggggaaggattccacgctgcagcacctggtgtcagggatgcaaaatagtgttgagcatcgaaattctgcgcttcttttgcgctcagaatcgggcgagaagaggtaccaggcgcggtttgatcagaaggacgttgatcgggcggggtactgctacaggcggtcagcgtcacgccaaaagccaatgccagcgccagacgggaaacactaaatgtgttcacaggttgctccgggctatgaaatagaaaaatgaatccgttgaagcctgcttttttatactaacttgagcgaaacgggaaggtaaaaagacaaaaagttgtttttaatacctttaagtgataccagatggcattgcgccatctggcagagtgattaactaaacatcgcagtaatgctggcgcttgccagagagtggaaatgaacgttaaacccgaccatcgcgccgctggcaccttcatcgacatcaatacgttctatatccagcgcgtgaacggtaaaaatgtagcgatgagtttcgcctttcggcggtgctgcgccatcgtacccggttttaccaaagtcggtacgcgtctgcaaaacgccgtctggcattgctaccagaccagagccaaacccttgcggtaatacgcgggtatcagcgggtaagttaacaactacccagtgccaccagccggagccggttggcgcatccgggtcgtagcaggtgacaacaaaacttttcgttcccgcaggaacatcatcccacgccagatgcggactaatattatcgccatcgtaacccatgccgttaaagacatgacgatgcggcaatttatcgccatcgcgcagatcgttactgatgagtttcatgaaccctcctttcttgtttgcagaaagtgtagccagaaaccctcacgcggacttctcgttattggcaaaaaaatgtttcatcctgtaccgcgcggttaaccgctgcggtcagacgctgcaactgttgcgggagaataatatagggcggcatcaggtaaatcagtttgccaaaaggccggatccagacaccctgttcgacaaagaatttttgcagcgccgccatattcaccggatgagtggtttcgaccacgccaatggcccccagtacgcgcacatcggcaaccatttcggcatcacgggcgggggcaagttgctcgcgcagctgtacttcaatatccgccacctgttgctgccagtcgccagattcgagaatcgccaggctggcgtttgctgccgcgcaggccagcggattgcccataaaagttggcccatgcataaagcaaccggcttcaccgttactgatggtttctgcaacctcgcgcgtggtgagtgtggcggaaagggtcattgtgccgccggttaaggctttaccgaggcacaaaatgtccggcgcgatttctgcatgttcacaggcaaacagtttcccggtacgaccaaatccagtggcgatctcgtcggcaatcagcaagataccttcgcgatcgcatattttgcggattcgttttaaccattccggatggtacatgcgcatcccgcctgcgccctggacaatcggctcaatgatcaccgccgcgatttcatgacgatgcgccgccatcaggcgggcaaagcccaccatatcgcgctcatcccattcgccatccatgcggctttgcggggcgggagcaaacaggttttctggcaggtagcctttccacagactgtgcatactgttatccggatcgcacacgctcatcgcgccaaaggtatcgccatgataaccattgcggaaggtcagaaaacgctggcgcgcttcgcctttggcttgccagtactgcaacgccattttcatcgccacttccaccgctacggaaccggagtccgcgagaaaaacgcactccagcggttgcggcgtcatcgccaccagtttgcggcacagctcaatggctggcgcatgggtgataccgccaaacatcacatggctcatggcatcaatttggctcttcatcgccgcattaagctgcgggtgattgtagccgtggatcgccgcccaccaggagctcataccgtcaaccaggcgtctgccgtcagacaaaatcagctcgcaaccttcggcgctcaccaccggataaaccggcagaggggaggtcatggatgtgtatgggtgccagatatggcgttggtcaaaggcaagatcgtccgttgtcataatcgacttgtaaaccaaattgaaaagatttaggtttacaagtctacaccgaattaacaacaaaaaacacgttttggagaagccccatggctcaccgcccacgctggacattgagccaagtcacagaattatttgaaaaaccgttgctggatctgctgtttgaagcgcagcaggtgcatcgccagcatttcgatcctcgtcaggtgcaggtcagcacgttgctgagcattaagaccggagcttgtccggaagattgcaaatactgcccgcaaagcagccgctacaaaaccgggctggaagccgagcggttgatggaagttgaacaggtgctggagagcgcgcgcaaagcgaaagcggcaggaagcacgcgcttctgtatgggcgcggcgtggaagaatccccacgaacgcgatatgccgtacctggaacaaatggtgcagggggtaaaagcgatggggctggaggcgtgtatgacgctgggcacgttgagtgaatctcaggcgcagcgcctcgcgaacgccgggctggattactacaaccacaacctggacaccagcccggagttttacggcaatatcatcaccacacgcacttatcaggaacgcctcgatacgctggaaaaagtgcgcgatgccgggatcaaagtctgttctggcggcattgtgggcttaggcgaaacggtaaaagatcgcgccggattattgctgcaactggcaaacctgccgacgccgccggaaagcgtgccaatcaacatgctggtgaaggtgaaaggcacgccgcttgccgataacgatgatgtcgatgcctttgattttattcgcaccattgcggtcgcgcggatcatgatgccaacctcttacgtgcgcctttctgccggacgcgagcagatgaacgaacagactcaggcgatgtgctttatggcaggcgcaaacagcattttctacggttgcaaactgctgaccacgccgaatccggaagaagataaagacctgcaactgttccgcaaactggggctaaatccgcagcaaactgccgtgctggcaggggataacgaacaacagcaacgtcttgaacaggcgctgatgaccccggacaccgacgaatattacaacgcggcagcattatgagctggcaggagaaaatcaacgcggcgctcgatgcgcggcgtgctgccgatgccctgcgtcgccgttatccggtggcgcaaggagccggacgctggctggtggcggatgatcgccagtatctgaacttttccagtaacgattatttaggtttaagccatcatccgcaaattatccgtgcctggcagcagggggcggagcaatttggcatcggtagcggcggctccggtcacgtcagcggttatagcgtggtgcatcaggcactggaagaagagctggccgagtggcttggctatagccgggcactgctgtttatctctggtttcgccgctaatcaggcagttattgccgcgatgatggcgaaagaggaccgtattgctgccgaccggcttagccatgccagtttgctggaagctgccagtttaagcccgagccagcttcgccgttttgctcataacgatgtcactcatttggcgcgattgcttgcttccccctgtccggggcagcaaatggtggtgacagaaggcgtgttcagcatggacggcgatagtgcgccactggcggaaatccagcaggtaacgcaacagcacaatggctggttgatggtcgatgatgcccacggcacgggcgttatcggggagcaggggcgcggcagctgctggctgcaaaaggtaaaaccagaattgctggtagtgacttttggcaaaggatttggcgtcagcggggcagcggtgctttgctccagtacggtggcggattatctgctgcaattcgcccgccaccttatctacagcaccagtatgccgcccgctcaggcgcaggcattacgtgcgagcctggcggtcattcgcagtgatgagggtgatgcacggcgcgaaaaactggcggcactcattacgcgttttcgtgccggagtacaggatttgccgtttacgcttgctgatagttgcagcgccatccagccattgattgtcggtgataacagccgtgcgttacaactggcagaaaaactgcgtcagcaaggctgctgggtcacggcgattcgcccgccaaccgtacccgctggtactgcgcgactgcgcttaacgctaaccgctgcgcatgaaatgcaggatatcgaccgtctgctggaggtgctgcatggcaacggttaataaacaagccattgcagcggcatttggtcgggcagccgcacactatgagcaacatgcagatctacagcgccagagtgctgacgccttactggcaatgcttccacagcgtaaatacacccacgtactggacgcgggttgtggacctggctggatgagccgccactggcgggaacgtcacgcgcaggtgacggccttagatctcagcccgccaatgcttgttcaggcacgccagaaggatgccgcagaccattatctggcgggagatatcgaatccctgccgttagcgactgcgacgttcgatcttgcatggagcaatctcgcagtgcagtggtgcggtaatttatccacggcactccgcgagctgtatcgggtggtgcgccccaaaggcgtggtcgcgtttaccacgctggtgcagggaagcttacccgaactgcatcaggcgtggcaggcggtggacgagcgtccgcatgctaatcgctttttaccgccagatgaaatcgaacagagcctgaacggcgtgcattatcaacatcatattcagcccatcacgctgtggtttgatgatgcgctcagtgccatgcgtagcctgaaaggcatcggtgccacgcatcttcatgaagggcgcgacccgcgaatattaacgcgtagccagttgcagcgattgcaactggcctggccgcaacagcaggggcgatatcctctgacgtatcatctttttttgggagtgattgctcgtgagtaaacgttattttgtcaccggaacggataccgaagtggggaaaactgtcgccagttgtgcacttttacaagccgcaaaggcagcaggctaccggacggcaggttataaaccggtcgcctctggcagcgaaaagaccccggaaggtttacgcaatagcgacgcgctggcgttacagcgcaacagcagcctgcagctggattacgcaacagtaaatccttacaccttcgcagaacccactagcccgcacatcatcagcgcgcaagagggcagaccgatagaaagtttggtaatgagcgccggattacgcgcgcttgaacaacaggctgactgggtgttagtggaaggtgctggcggctggtttacgccgctttctgacactttcacttttgcagattgggtaacacaggaacaactgccggtgatactggtagttggtgtgaaactcggctgtattaatcacgcgatgttgactgcacaggtaatacaacacgccggactgactctggcgggttgggtggcgaacgatgttacgcctccgggaaaacgtcacgctgaatatatgaccacgctcacccgcatgattcccgcgccgctgctgggagagatcccctggcttgcagaaaatccagaaaatgcggcaaccggaaagtacataaaccttgccttgttgtaaccattctgtatttggttaaattgcgagcgagatcgcgtcttcgattgactgcaatttaaccaattaaattctaaaataatcacgaaaaaaattttacttccgcctcatgcggcgaatgtgggaattgcccaggcggcgggggataggggctggagacagttatccactattcctgtggataaccatgtgtattagagttagaaaacacgaggcaagcgagagaatacgcggcttgcacgcgaattggcgttaaagacggctcaaagaaatatcttttattttttaactggttagataaatgcaatggcagtcactgaacaggcatctcttgccataaaactgtcatcactcatcttgacaaatgttaaaaaagccgttgctttggggataacccggtaaggccggagttttatctcgccacagagtaaattttgctcatgattgacagcggagtttacgctgtatcagaaatattatggtgatgaactgtttttttatccagtataatttgttggcataattaagtacgacgagtaaaattacatacctgcccgcccaactccttcaggtagcgactcatgagtaaaccgttcaaactgaattccgcttttaaaccttctggcgatcagccagaggcgattcgacgtctcgaagaggggctggaagatggcctggcgcaccagacgttacttggcgtgactggcagtgggaaaaccttcaccattgccaatgtcattgctgaccttcagcgcccaaccatggtacttgcgcccaacaaaacgctggcggcccagctgtatggcgaaatgaaagagttcttcccggaaaacgcggtggaatatttcgtttcctactacgactactatcagccggaagcctatgtaccgagttccgacactttcattgagaaagatgccagcgttaacgaacatattgagcagatgcgtttgtccgccaccaaagcgatgctggagcggcgtgatgtggttgtggtggcgtctgtttccgcgatttatggtctgggcgatcctgatttatatctcaagatgatgctccatctcacggtcggtatgattatcgatcagcgcgcgattctgcgccgactggcggagctgcaatacgctcgtaatgatcaagcattccagcgtggtactttccgcgttcgtggcgaggtgatagatatcttcccggcagaaagcgatgacattgcacttcgcgtggaactgtttgacgaggaagtggaacgattgagcttatttgacccgctgaccgggcagattgtttccactattccacgttttaccatctacccgaaaacgcactacgtcacaccgcgcgagcgcatcgtacaggcgatggaggagatcaaagaagagctggccgccagacgcaaagtgctgttggaaaacaacaaactgctggaagagcagcggctgacccagcgtacccagtttgatctggagatgatgaacgagctgggctactgtagcgggattgaaaactacagccgcttcctctccggtcgtggaccgggtgagccaccgccgacgctgtttgattacctgcctgccgatgggctgctggtcgtcgatgaatctcacgtcaccattccacaaattggcggcatgtatcgcggtgaccgggcgcgtaaagagacactggtggagtacggcttccgcctgccaagtgcgctggataaccgtccgcttaagtttgaagagttcgaagcattagcgccgcaaaccatctatgttagcgcgacgccgggtaattacgagctggaaaaatccggcggcgatgtggtggatcaggtggtgcgtccaaccggattgcttgacccgattatcgaagtgcggccggtggcgacacaggttgatgatcttcttagcgagattcgtcagcgagcggcaattaacgaacgcgtactggtcaccacactgaccaagcggatggcggaagatcttaccgaatatctcgaagaacatggcgagcgcgtgcgttatcttcacagtgatatcgacaccgtcgaacgtatggagattatccgcgacttgcgtctgggtgagttcgacgtgctggtagggatcaacttactgcgcgaaggtctggatatgccggaagtgagcctggtggcgatcctcgacgctgacaaagaaggcttcctgcgttccgaacgtagcttgatccagaccattggtcgtgcggcacgtaacgttaacggtaaagcgattctctacggcgataagatcaccccaagtatggcgaaagcgattggcgaaaccgaacgtcgccgtgagaaacagcagaagtacaacgaggaacacggaattacgccgcaaggcttgaacaagaaagtggtcgatatcctggcgctggggcagaacattgccaaaaccaaagcgaagggcagaggaaaaagccgcccgattgttgagccggataatgtgccgatggatatgagccctaaagcgttgcagcagaaaatccatgagctggaagggttgatgatgcaacacgcgcagaatctggagttcgaagaagcggcgcaaattcgtgaccagttgcatcagctgcgtgagctgtttatcgcggcaagctaacaggatagcgaagaagactgatgacaaacggaaaacagcctgatgcgctacgcttatcaggcctacattttctccgcaatatattgaatttgcgcggtttgtaggccggataaggcgttcacgccgcatccggcataaacaacgcgcactttgtcttcaataggaagccggaattttccttcggatttccgttaacctaaagcctgtaacgccttttccagcgcgttatgtaacaactggcggtcatgacgatacggaatatcgctggcctccagtacctcctggatcacaatccgctctttcaccgcgctgacatccacttttggcccgacgatgaccgcatcaatgacctttttaccaacatactgctccataattgccagcttgctttccagcttcaaattagccgcaggtaaactcaactcacgccccagattgccgatataaaccatcggcgctggcgtgcggcgtaatgcctgggcgatttccttcagcagcagaattggcatcaggctggtataaaaactgccaggcccaataatgatgagatccgcttcattgatagcgtgaaccgcctcacgcgttgcgggtacattaggcgttaacaataactcttgaatcggcgtagttaactggtcgatattgacctcgccgtaaacttcatgcccctgatcgtcaatcgccatcagatcaacaggatgctcactcattggaatcaaatgcgtatccactttcagcagattacgaattaaattgatggcttccagaggccgcacgctaaggtgatccagcgcctttaacatcaagtttccgagattatgaccggaaagttcgccattgccaccaaaacggtattcaaacatcgcggaggcgacgctcggttccgttatcagctggttgaggcagttgcgcatatcgccccaggcaatgccgccttcactacggcgaatacgccccgtgctgccaccattatcggtggtggtgacgatacccgttaaacgagaacccaaagagctaagactactgagaacgcgtcccagtccatgccctccgccgagagcaacgacacgatcaagatcagccagcgtacgattgcgcatatagtttcctggagtcagattatccgcgctacagtagcgcaaattgcggggaaacagcaattaacctgccaatattgaggatacaaactattttcttctacctctaaaggacgatgcacgctatgcctccctgatgatgtatatcaaagtaaaaccgccattttcccttattctgtagcgaaatagcacgatcatgacgctatatacatgattacatagcgaaagtgtggatggtaaaaatctcatttacacgctagtatcggcataaccactaaacactctagcctctgcacctgggtcaactgatacggtgctttggccgtgacaatgctcgtaaagattgccaccagggcgaaggaagaaatgacttcgcctcccgtatctggaaaggtgtacatggctagtcaactgactgatgcatttgcgcgtaagttttactacttgcgcctgagcattaccgatgtgtgtaactttcgttgcacctactgcctgccggatggctacaaaccgagcggcgtcaccaataaaggctttcttaccgtcgatgaaattcgccgggttacgcgcgccttcgccagactgggcaccgaaaaagtgcgcctgacaggaggagagccgtctttacgccgcgactttaccgatatcatcgccgctgtgcgggaaaacgacgctatccgccagattgcggtcacaaccaatggttaccgtctggaacgcgatgtggcgagctggcgcgatgcgggacttactggcattaacgtcagtgtcgacagtctggacgcccgccagtttcacgctattaccgggcaggataaattcaaccaggtcatggcagggattgatgctgcatttgaggccggttttgagaaggtcaaagtcaataccgtgctgatgcgtgatgttaatcatcaccagctcgacacctttctgaactggatccagcatcgccctatccagctgcgtttcatcgaactgatggaaacgggcgagggcagcgagctcttccgtaagcatcacatctctggtcaggttctgcgtgacgagctactgcgtcgcggctggatccaccaattacgtcaacgcagcgacggtcccgcgcaagtcttttgccatccagattacgccggagagattggccttatcatgccgtatgaaaaagacttctgcgccacttgcaaccgcctgcgcgtttcctccattggtaaactccatctctgcctgtttggtgaaggcggcgttaacctgcgcgatctgctggaagacgatacccagcaacaggcgctggaagcgcgtattagtgcggcgctgcgggagaagaaacagacccatttcctgcatcaaaacaacaccggtattacgcaaaacttaagctacattggcggctaaaacgtcaaaaggagagatcagatgagtcaggtaagcactgaatttatcccgacccgtattgctattcttacggtttctaatcgtcgcggtgaagaagacgatacctccggtcactatctgcgcgatagcgcgcaagaagcgggccatcacgttgtcgataaagccattgtgaaagaaaaccgctacgctattcgcgctcaggtatctgcgtggatcgccagcgacgatgtacaagtggtattgattacgggtggtactggcctgacggaaggtgatcaggctcccgaagcattgctgccgttgttcgaccgtgaagttgaaggttttggtgaagtgttccggatgttgagctttgaagagattggcacttccacgttgcaatctcgtgcggtagcgggcgtcgccaacaaaacgctgattttcgccatgccgggtagcaccaaagcgtgccgtaccgcatgggaaaatatcatcgcgccgcagctggatgcccgtacgcgtccgtgtaatttccatccacatttgaagaaataagtatgagccaactgacccatatcaacgccgctggcgaagcgcacatggtggatgtctccgccaaagcggaaaccgtgcgtgaagcgcgggcggaagcctttgtcaccatgcgcagcgagacgctggcgatgattattgatggtcgccaccacaaaggcgacgtatttgccactgcgcgtattgccggtattcaggcggcaaaacgcacctgggatctgatcccgctctgtcatccgctgatgctcagcaaagttgaagtcaatttacaggccgagccggagcacaatcgggtgcgtatagaaaccttatgccgcctgaccgggaaaaccggtgtcgaaatggaagcattaaccgcggcctccgtggcggcgctgaccatttatgacatgtgcaaagcggtgcaaaaagatatggtgattggtccggtacgtttgctggcgaagagcggcggcaagagcggtgactttaaggtggaagcggatgattaaagttctttttttcgcccaggtgcgcgagttggtgggaacagatgcaaccgaagtggctgcggatttcccaactgttgaagcgttacgccagcacatggctgcgcagagcgatcgctgggcgctggcgctggaagatggcaaattactggctgccgtcaaccagacgctggtgagttttgaccatccgctgactgacggcgacgaagtagctttcttcccgccggtaaccggaggttaagatggcagaaaccaaaattgttgttggtccgcagccgttcagcgtaggagaagagtacccgtggctggcggagcgtgacgaagacggtgcggtagtcacctttactggtaaggtgcgcaaccataacctgggcgacagcgtcaacgcattaaccctcgaacactatccggggatgactgaaaaagcactggcagaaattgttgatgaagcgcgtaaccgctggccgctggggcgcgtcactgtgattcaccgcatcggggaattatggccgggcgatgaaatcgtttttgtcggtgtcaccagtgcgcatcgcagcagtgcgtttgaagccgggcagtttattatggattatctcaaaacccgcgcaccgttctggaagcgcgaagccacgccggaaggcgaccgctgggttgaagctcgggagagcgatcagcaggcggcaaaacgctggtaattttttgttagccggataaggcaccgctgcgtccggcaatttcaccgctcagtacatacgtttacgctgcgtcgatgcacagcctcatcattttgcagtatccttaagatattccttatatcttcaggagatcgtcatggacagattcccacgttctgatagtatcgtacaaccccgggctggcttgcaaacttatatggctcaagtctatggctggatgaccgttggcttgttgctgaccgcatttgttgcctggtatgcggctaattccgcggccgtgatggagctgttgttcactaaccgtgtctttttaatcggtctgatcatcgcgcaattagcattggttattgtgttaagtgcgatgattcaaaagctgagcgcaggtgtaacgacgatgctctttatgctttatagcgcgctgacgggtcttacgctttccagtatattcattgtctataccgctgcttctatcgccagtactttcgtcgttactgccgggatgttcggcgcaatgagcctgtacggttacaccacgaagcgcgatttaagtggctttggcaatatgctgtttatggcgttaatcggcattgtgctggcaagcctggtcaacttctggttgaaaagcgaagcattgatgtgggcagttacctacatcggcgtgattgtctttgtcggattgacggcgtatgacacgcagaaactgaaaaatatgggtgagcagattgatacccgcgacacgagcaacctgcgcaaatattccattcttggcgcgttaaccttgtatctggacttcatcaacctgttcctgatgttgttgcggatcttcggcaaccgccgttaattctttttcaccatcactatcccggccatgtgtcgggatttttttcttactaaaaacgacacttaacaagtaccaggtataaaatatgccttatggacgagcggaagcgttttctgtatccataaatgcaaaagtattttgtatgcgtggttttaaatttattgatggtgaatattaatattttttctaaggataactaaaagaatggaaagttacagccaaaacagcaataaattagattttcagcacgaggccaggatattaaacggtatatggctcattaccgctttaggtttggtggcaaccgcaggactagcctggggagctaagtatatcgaaattacggcaaccaaatatgatagtccaccaatgtatgtcgccatagggttattattactttgtatgtatggcttaagtaaggatatcaacaagataaatgccgccatcgcgggcgtaatatatctgtttttactctctttggtggcgattgtcgttgcaagtttagttcctgtatatgccattatcatcgtgttcagcactgcgggcgcgatgtttttaatcagtatgctggccggtttattatttaatgttgatcctggttctcaccgttttatcattatgatgacgttgacagggttggccctggtaatcatcgtgaatgcggcattaatgagtgaacggcccatttggataataagttgcttaatgattgtgttatggagtggcattatcagccatggacgaaataagctccttgaattggcggggaaatgccatagtgaagagttgtggagtccggttcgttgcgcttttacaggtgcattaacactctattactattttatcggcttctttgggatacttgccgcgatagctataacgcttgtctggcaaaggcatacgcgtttttttcattaaccgtaaatgcacatactaaagaacttaactaaacttcacatcgccgcttcatttttcgcccgtagcttcttcgcctggctttccagcaacaggtaacagatcagcgccagcagcagtgggataaagtaatacagcacacggtaagcgagtagggcggcgataattgtacctttggaggtatgctccccagccagtagtgcgataaacaccgcttccagcacaccgatccccgccggaatatgcacgatgacgccagcaatactactaaccagtaacacgcccagtacaaagaaatagttcacgctttgaccaagtaacagccagataatcgcccccattaccatccagttaacgctggaaatcagcatctgagcgagggcgaatttccaactaggcagcaccagcttttgccctttgatggtcatatggcggtgcttcgcgaaagcgcaaaaccacaaataaaccgcgataatcatcagtaagccaatgccgagaatacgcagcgtagtttgatcgacataccagtgatccggcaactccaccacgcctgcggtaaagataatccctgccagtaaaatgtagcccagccagttggtggtaatactgaggctgaaaatccgcgtaatagtgctaccgggcaaccccagacgagagtacaaacgatagcgcataccaatgccgccgacccaggtactgagcgtcaggttgaaggcgtagcagataaagctcaccagcatcacctggcgcttcgccagtttgtgaccgcagtaaaagcgggcgagcaggtcatagcagccgtaaatcagatagctgacgaccaccagcccgaccgcactaagcagcgcaacgcgattgtagtcgcggatgaccttccagacctcttcccagtccacttttttggcgtagaccaccagcaacacaatcaccgcgataaaaaacagccaggtgaggatcttctttgctaagcgccagcgcgggtgacttttactcatcagggttttacccccgtgttttcagtttctacccgatcctgcgtttccattgtcggttgtgcgggcggatcaacctgcgccagacgtggcgtgtgtgccggaagccagccaaccagcgccgggaagtggcgtaaaaagtggaacgccagcacgcttttggtcaggttccaccaggtgcgtttgggcagcatggtttcatccacctgctgacaatctgcggcaataatgccgttcagattatcgcgcagcgtctggttaaaatgacgatcgtggatgatgacatttgcttcgagattcagactcaaactgagcggatcgagattactggaccctactgtcgcccagtgatcgtccatcaatgccactttgccgtggagcgggcggcggcggtactcaaaaacctgaacgccgcctttaaccagatagttatacagcaagcgcgcaccgactctgacaatcggcatatccggttcgccctgaatgatcagtttgatccgcaccccgcgccgtgccgctttacgcaaggcgtgtaaaaatcgatagccggggaagaagtaggcgttggcgataatcacttcccgccgcgcctgagtgagcattttcaaataatggcgttcaatatcatcgcgatgttcttcgttatcgcgccagaccagcaatacctgcgcttctcccggctggcggttctcttccgctttgtgatgacgtcgccaccagcgtcgtgccgcgctctgtccaggcaggttttccagctcaaactggagaatatcttcgacaatcggcccttcaaggcgtaccgcgtaatcctgtttagcctctggaccgtagctggacatatgctcggcggagtaattcagcccgccaataaaggctatacgcgcgtcgatcaccacaattttgcgatgcatccggcgaaacacattggtgcgcataccaaaaaggcgagggcggggatcgtagtagcggaacactacgccagctgccgtcagttcattgacaaactcatcgctgagatccgggctaccgtagccatccagcaagacttccgctttaaccccgcgttgcgctgctgccagtagtgccgcatgcagttgtttgccgacgtcatcctcaaaccagataaacgtttcaagaatgatgcgttcttgtgcctcgccaatcgccttaaacaccgcgggataatattgctcgccgttttccagcaactggatcttattgccttcgcgccagctacatttcataaatgaatctccgcacttaaaggggcatgatcagaaaggtgtcgccatgtccgcagcggcaacgcggttggcgcgctggcgctggcatttttgacgtagatcctgtccagtcgtagtagaggaaattgcaccggaaacgtgcgcgccgggcgtccgtgggcgcgggtaaaaatctcatccagtccggcctgcacttttaacggatgattagctttttgccgccagtcattgaaatcacccgccaccaataccggttcgccgtccggtagctcattcacccattcggcgagcatcgcaagctgcgcctgacggtgcgcctcacgcaggcccagatgtacgcacatcacatgaatcgcttttccggtcatcggcggcacaatgcggcagtagagcacgccgcgcttttccgcaccatcgacgctaacatcgcgattctcataatgttcaatgggataacggctcagtacggcgttgccgtgatgcccttccgggtatacggcattgcgaccgtaggcaaaatcgctccacatagtgtcggcgagaaactcgtagtggctggtatcgggccagttttccacatgcagcggatgaacttcgtgcgcgcccatcacttcctgcaggcaaacaatatcggcgctgacggtacgcacggcgtcgcgaagttccggcaaaatgaagcgtcggttaaacgcggtaaagcctttgtgaatattgatggtgagcaccttgaagctaaattgttgtgtttgatcgggcataattttcctgtctttgcctcttatctcattgaaatagtgtagtcggcgtcacaaaaaggtgcggtcttacggaattttccgtaaagttcggtactctgagtaagtagagataaattcttcaggagagaagccatgaagtggcaacaacgtgttcgtgtcgcaacgggtctaagttgctggcagattatgttgcatttactggtagtggcgctgctggtggtgggctggatgagtaagactctggttcacgtcggcgtgggattatgcgcactgtattgtgtcacggtagtgatgatgctggtgtttcagcgccaccccgagcaacgctggcgtgaggtggcagacgtgctggaagagctgaccacgacctggtattttggcgcagcgctgattgtgctgtggctgttgtcccgcgttctggaaaacaactttttgctggcaattgcagggctggcaatccttgccggcccggcggtagtgtctttgctggcgaaagataagaagttacatcaccttacgtctaaacatcgcgtacgccgctgattacatcaccttacgtctaaacatcgcgtacgccgcactccctgtcgtggccgttatcaccagtagcggccacaaactattccacacaatatccagactcgcatccttcaaataaatctgcttggtaatgtccgtaaagtggcgaatagggttaatccacgtcaggttttgcagccataccggcatgttttccaccggagaaacgtaaccggaaaggagaatggcgggcatcataaagacaaacacgccgataaacgcctgctgttgtgtactacagagactactaatcaacagaccgaatcccaccaggcttaaaccataaatcaccatcgtaaagtagaacagcgccaggcttccggcgaaggggatttgatacgcccagataccaatcgccagcacaatggtggcctggaaggtggcgacaattaacgccggtacggctttgccgatgaagatctgccaggtggtgagcgggctaaccagtagctgatcgagcgtaccttgttcacgttcgcgggcgacggaaagactagtgacgatcattacgccgatagtggtgatcatggcgatcagactcggcaccacaaaccatttgtagtcgagattcgggttataccagttgcgtaccaccagctcgctgttgttaggtttcggttttccttccagcagctcctgctgataatttttgacgatctgttgcaggtagttggcggcaatttgcgcactgttggagttacgcccgtcgaggatcaactgcaaaggcgcggtctggaaggtatccagtttgcggctgaagtcagccgggaaacgcaccagtagtaacgccttttgtgtgtcgatggttgggcggatctcctgtgggcttttcagcagcagcacatgagtaaaggcgctggcgcgggcaaaacgttgggtcagctccacgctatgctcgccgttatcttcatcgtagatggcgatggtggcgttagtcacttccagcgtggcggcgaacgggaacaggatcacctgaattagcacgggtaaaatcagaatcgcgcgggtttgcggttcgcgcagcaagctctgcaactctttgcggattaacgtccataagcgatgaaacatgctcttctccttaatccagccgacgtttggttttcagccacgtcaggccgataaacatcaccgcgctagcgatcaaaaacagcacgtttaccaccagcaccactggaatattcccggcgaggaacaggctttgcagggtgctgacgaaataacgagcgggaataatgtacgtcaccgcgcggatcaccgcgggcatactgtcgatctgaaaaataaagccggaaagcataatgctcggcagaaaagcggcgttcagggcgacctgagcggcattgaactggttgcgggtaatcgtggaaatcagcagccccatccccagggtactgagtaaaaacaggctggagataaaaaacagaatcagcaggctcccgcgatacggcacgccgagaataaacacactcaccagcatacacagcaacatcgccagcatcccgagaaagtaataagggatcagcttacacagcagcagttccgtgcgggtaatctccgtagagagcagagcctccatggtgccgcgttcccattctcgcgccaccaccaggctggtgagaatcgcgccgatgaccgtcatgataatggtcaccgcaccggggataatgaagtgctggctaatcgccgccgggttaaaccagtagcgggtttgtacatcaataagcggttcaaaagtctgcccgttgtcctccgctcgctgcatttgccagatctgccagatcccttcgacatacccctgtacaaagttagcggtattcggctcactgccgtcggtgatcacctgaatcggtgcggtggcgttggcgcgctccatctgttccgcaaaatccaccggaataaccaccagaccgcgaattttccccgcctgcattttggcgatcagttcctgacggttatcgctgatggtggcgtcgatgtaggggctaccggtcatggtgtgggtgaaatccagcgccgcttcgctacgctgttccagtaaaatcccgacccgcagcttgctggagtcgaggttaatgccgtaaccaaaaataaacagcagtagcagcgggatcactaccgcaatcagccagctactcggatcgcgaacgatctgccgcgtctctttaacgcacagcgcccgtacgcgacgccaggacaggatcgggttactcattgctatgctccttatcccagtcgtggatcaactgaataaaggcttgctccatggtgggatcgggttgctcatcgttagcgctctgtgctttcaaatcgtccggcgtgccgctggcgattaatttcccgcggtacaccaggccgatgcggtcgcaatattccgcttcatccataaagtgggtggtgaccatcaccgtgacgcctttctctaccatgctgttgatgtgcagccaaaattcacggcgggtgagggggtcaacgccggaagtcggttcgtcgagaaacagaatgtccggttcatgcatcaggctacaggccagcgccagccgctgtttaaaacctaatggcagttcatcggtggcgtgggaggcgatacttttcaggccgaacgcctcgctcatgcgggagattttttcgttctgcgcccgaccgcgtaagccatacacaccagagaaaaagcgtaaattctgttcgaccgtcaggttaccgtagaggctaaatttttgcgccatatagccgagatgctggcgcgctttaccggaactctctttcagatccatccccagcaccagcgcctggccggaagtcggcaccagcaaaccgcacatcatcttaaaggtggtgcttttacccgcgccgtttggccccagcaaaccaaaaatctccccacgtttaacggcaaagttgacgtgatcggtggcggcaaaatccccaaatttcttggtcagttctttcgcttcgatcaccgtctcgccgggtgtgccttctaccgtatgtaatattgcgcccagcgggctttcgctggttccggcaccgcccagcaaatcaataaacgcatcttcaaaacgcggcgtagtttcgttgatgttgatttccggcatcccgtcggcatggcgaatatcgtctggtgtggcctcttttttgaggatcagacgtacgcttttcccctgaatcatgccgtcgctgacctgcggcagtttcaaggcgcgttgcaacagtttgcggttgccctcgtgtggactggtcatcagaaagctgcgtccggccatggtttgtgtcagggcttttggttctccctgatacagcaactcgccttcgttcatcagtaacacgtcacggcactgctcggcttcgtcgagatagctggtactccagaggattaacatcccttcgcccgccagctcatgcaccatctgccacagttcgcgccgactgatagggtcaacgccgacgccgggttcatcgagcagcaacactttcggttcgcccaccagggtacaggccagaccgagtttttgtttcatcccaccggagagcttgcccgccaggcgtccggtaaacggcccaagagacgtaaactccagcaggcgagcaaaagtttgcttacgtgcctcgccggtgacgctgcgcaaatccgcgtacagattgaggttctccatcaccgtgagatcttcatacagaccaaatttctgcggcatataaccgagcacggcgtgcagcgcgccgtcgtttttgatcggatcaaagccaatcaccgtggcactgccgctgtcgggtttcagtaatcccgccaacatccgcatcagcgtggttttacctgcaccgtccggccccaccaaccccgtcacataaccggcgtgaatggtacaatcgagcggcgcgacggcgggcttgtccatgcccggaaagcgtttttccaggccgttcagcgtgataacggcatcattcatgtcctgcctcgtcaccgaattgtaccgtcactggcattccctggcgtaacgcatcatcggcgtcggtcaccacaatacgcaggcgatagacgaggtcggtacgcagatccggcgtttcgacggttttcggggtaaattcagcagtcgggctaacgaaaccaatctgcccgtgatacggcttgtccgggcgaccatcggtataaagcagcactttgcgccccggctgggcctggtcaagattacgttcatcaacataagcgcgcacccacaccggacgcgttagactaacggtaaacaccgtgccaccttcattgaggaccgtgcctggctccaccgcgcgcgttaacagcgtgccatcagacggggctatcaacgtactgtcctgtaaattcaactccgcctgcgccagttgcgcctgcgcctgttcgaggctggctttcgcctgagcgatgtcctgttcacggttaccggaacggtactgacgcaatttatcctgtgcacttttcagcgttgcctgcgcctggtcgcggctggagcgggcattttccaggtcatttgcgctaatagtgcggcttttccacaacccttgctggcggttatagaagttctgcgcatagtcataggcggcttgcgcctgtttcaccgctgcggcggcctgagcgatttcttcattgcgatacccggcaagcatcaggtcatactgcgcctgtgccacgctaacacccgctttcgcctgcatcagggcaatctcatacggcttgtgatccagttcgcccagcacctggcccgctttgatagcatcaccttcgtccaccgccaggctttcaacgcgccccccaacacggaaactaagatttaccgtacgaatatccacgttgccatacagcgtcaggccgttatcctggcggctttgataccaccagtagcctccggcaaccacggcggcaagtaccactaccgccaatccgatcacgacaggttttttcatcactacaaactcctttgcgataattacaaactcctttggcttaatccttgcaaaatcaggtcgatatgacaggtcaccgtctggttgatcagttcggtcttttcttcatcgaacgcggtccagccggtacgtaacagaattgtttctttgccaagacggaacgccagaatctcaccaatcaacgcatgggtatgaaggatcatgcgggtgtcattggcgtcgcagccggtccaggcggcaatcaggcgtgtcaggtggctgtgtagcggactaatcacctgttcgtgcaccaggtggtaggctgccgtgggagagagctgctcacgggagataaacttgctgaggttgacggtgtcatcctgggtgagcagcttaatcatgttcctgcaggcgcgaaggatcagttcacggatggcagcccgatcaggctgtggttgcgcgaacaagcgttcggcttcctcggcatgcggacggaactgctcgccaataaaatcggcaatccactgggcgcaggcgaggtacaaatcttctttgctaccgaagtagtaggtgatggcagcgatattctgcccggcctgggcggctatctcgcgagtggtggcgttcattccatattcaccaaactgcgccagtgcggcagcaatcagctgttttttcgcctgttcacccttgattgtcatggcaggattattcatcgcacagtccattcttaatcaaatgattgattaagattatgactccataggggagttgtccagtatggctaagaattttagcaacgccagtcacagggataatttatgcgctgcgtcacaaaaactgctacactccgctccctcatgacattgtggtttttgtcattttccttttcagtatctccctgaaaactacaccggtaacggtcggggcggttcggagtagttatgtctttcgattctttgggtttaagccctgatatcctgcgcgccgttgccgagcagggttaccgtgaacccacccctattcagcagcaggcgatccctgcggtgctggaaggccgcgacctgatggctagcgcccagaccggcaccggcaaaacagcgggctttacgctgccgctgttgcaacacctgatcactcgccagccgcacgccaaagggcgtcgtccggtacgtgcgctcattcttaccccgacccgtgaactggcggcgcagattggcgaaaacgtccgtgattacagcaaatacctgaacattcgtagcctggtggtgtttggtggtgtgagtattaacccgcagatgatgaaactgcgtggcggcgttgatgtgctggtggcaaccccgggacgtttgctggacctggaacatcagaatgcagtgaagctggatcaggttgaaatcctcgtcctcgatgaagctgaccgcatgctcgacatgggctttatccacgatatccgtcgcgtgttaacaaaactacctgcgaagcgccagaacctgttattctccgcgaccttctctgacgatattaaagccctggcggaaaaactgttgcacaacccgctggaaatcgaagtggcacgccgcaataccgcgtctgatcaggtgacccagcacgttcactttgtcgataagaaacgcaaacgcgaattgctgagccacatgattgggaaagggaactggcagcaggtgctggtgtttacccgtaccaaacacggcgctaaccatctggctgaacagctcaataaagatggcatccgtagtgcggcgatccacggcaataaaagccaaggtgcgcgtactcgtgcgctggctgattttaaaagcggcgatattcgtgtactggtggcaactgacatcgctgcgcgcggcctggatattgaagagctgccgcacgtcgtcaactatgaactgccaaacgtacctgaagattatgtccaccgtatcgggcgtaccggtcgtgcggctgctaccggtgaagcgttgagcctggtgtgtgttgatgaacacaaactgctgcgtgatatcgaaaaactgctgaaaaaagagatcccgcgcattgcgattccgggctatgagccggacccgagtatcaaagccgaaccgatccagaacggtcgccagcaacgtggcggcggcggtcgtgggcaaggtggtggtcgcggtcaacagcaaccacgccgtggggaaggtggcgcaaaatctgcaagcgcgaaacctgcagaaaaaccgtctcgccgcctcggcgatgccaaaccggcaggcgaacaacaacgtcgccgccgtccgcgtaaacctgccgctgcgcagtaatcttttatgccgggctatgcccggcatcaggctgatgaacaaacgcaaaactgcctgatgcgctacgcttatcaggcctacgtgaactctgcaatatattgaatttgcatgcttttgtaggccggataaggcgtttacgccgcatccggcatttcacaacaagcacttgtcagcaatttgagaacacgggaaaaaatttatctgttttaccgcccataagccaccgagacgttacttctctatagccaattgttcgcgcaactccattaaaaggtagcccagtcgattcttgcccttaccatgaccaccgtctccccagtaagcatcgttttccgtatgctcaaccagttttgcgggcgcggttgccagcaagagcgcacgcagttctgcatgctgttcgaatttagcgcgaagtgcttttcgcatcacctgttctttgacgctctcccagtttttacgcagaggcttagaacgatcgcgccccatgcgtgcggcgaccataggggaagaaacccgacggatctcttcgcggtatttttcatcaaggaatttttgtgcctgaaaatagtgttcactggtaggccaggttttcccgtcaaccttgatgggccaggcggcaaagttagaaaaatcaccgtagtcatcgctggtgctgtagaaatttatgatggtgtcttgcatgacgtgttggatcctttgtgctcgaacgggcattaaaccgcattatgttggtggttattgcgagccgctttccagaaacagaaaaaccattacccctgaaaaccgaaaaatgccacaatattggctgtttatacagtatttcaggttttctcatggcattaaccgccgcgcttaaagcgcaaattgccgcctggtataaggcgcttcaggaacagatccccgactttattccccgtgcgccgcagcggcagatgattgcggacgtcgccaaaacgctggccggagaagaagggcgacatctggcgattgaagcccccaccggcgttgggaaaacgctctcttatttgattcccggcatcgccattgcccgcgaagagcaaaaaacgctggtggtgagtaccgccaacgtggcattgcaggatcagatttacagcaaagatttaccgctgctgaaaaagatcattcccgatcttaaattcactgccgcttttgggcgtgggcgctacgtttgtccgcgtaatctgacggcgctcgccagtactgaacccacgcaacaggatctgctggcgtttcttgacgacgaactgacgccgaacaatcaggaagagcaaaaacgttgtgcgaagctgaagggcgatctcgatacttataaatgggatggtctgcgcgatcatactgatatcgctatagatgacgatctctggcgtcgtttaagtaccgacaaagccagctgcctcaaccgcaattgttactactatcgtgaatgcccgttttttgtcgctcgtcgggagattcaggaagcggaagtggtggtggcaaaccatgcgctggtgatggcggcgatggaaagcgaagcggtattgcctgacccgaaaaatttactgctggtgctggacgaaggccatcacctgccggatgtggcgcgggatgcgcttgagatgagcgccgaaatcaccgcgccgtggtatcggctacagctggacttgttcacgaaactggtcgctacctgcatggagcagtttcgcccgaagaccatcccaccgctggcgatccctgaacgtttgaatgcgcattgtgaagagttgtatgagcttatcgccagcttaaacaacattctcaatctctacatgcctgccgggcaggaggcagagcaccgttttgcgatgggcgaactgccagatgaagtgctggagatctgccagcggctggcaaaactcaccgagatgctgcgtggcctggcggagttatttcttaacgatttaagtgagaaaaccggcagccatgacattgtacgtctgcatcggttgattttgcagatgaaccgcgcgttggggatgttcgaggcgcaaagcaaactctggcggctggctagcctggcgcaatcttccggtgcaccggtgaccaaatgggcgacgcgggaagagcgcgaagggcagctacacctctggtttcactgcgtgggaatacgtgtcagcgatcagctggaaaggctgctgtggcgcagtattccgcacattattgtcacctccgcaaccttgcgtagcctgaacagttttagccgtttgcaggagatgagtggtctgaaagagaaagcgggcgaccgttttgtggcgctggattccccctttaaccactgcgaacagggcaaaattgttattccccggatgcgcgttgagccttccatcgacaacgaagagcagcatattgccgaaatggcggcctttttccgtaagcaggtggagagcaaaaaacatctcggtatgttggtactgtttgccagcggacgggcgatgcagcgctttctcgactatgtgacggatttacgtctgatgttgctggttcagggcgatcagccgcgttaccgtttagttgaactgcaccgcaaacgcgtcgccaacggtgagcgcagcgtgctggtgggcttacagagttttgccgaagggcttgatttgaaaggtgatctgctcagccaggtgcatatccacaaaatcgcttttccgcccatcgacagcccggtggtgatcaccgaaggggaatggctgaaaagcctcaaccgctatccgtttgaggtgcaaagcctgccgagcgccagctttaacctgattcagcaggttgggcgactgattcgaagccacggttgctggggcgaagtggttatctacgacaaacgcttgctgaccaaaaattatggcaagcgactactggatgcattaccggtatttccgatagagcaaccggaagtccctgaaggtatagttaaaaagaaagaaaaaacgaaatccccacgccgtcggcggcgttaatgatgtgagtcaggtaaggagtcgtaaatggactatcgcaaaatcattaaagagatcgggcgcgggaaaaaccacgcgcgcgatttagaccgggatactgcgcgcggtctgtatgctcatatgctcaatggtgaagtccctgaccttgagttgggcggcgtattgattgcgctgcgtatcaaaggagaaggggaagcagagatgctcggcttttacgaagccatgcaaaatcacaccatcaagctgacgccgccagcaggcaagccgatgccgattgtcatccccagttacaacggcgcgcgtaaacaggccaacctgacgccgttgttggcgattctcctgcacaaactcggttttcctgtggtggttcacggggttagcgaagatccaacccgcgtgctgactgaaaccatttttgaattgatgggtattacgccaacgttgcacggcgggcaggcgcaggcgaagctcgacgaacatcaaccggtgtttatgccagtcggcgcgttttgcccgccgctggaaaaacaactggcgatgcgctggcggatgggcgtgcgtaacagtgcacataccctggcgaaactggcgacgccatttgccgaaggtgaggcgctgcgtctttccagcgttagccatccggaatacattggacgcgtcgcgaagttctttagcgatatcggcgggcgggcgctactaatgcatggtactgaaggtgaagtgtatgctaatccgcagcgctgcccgcagatcaatctcattgaccgtgaagggatgcgggtgctgtatgaaaaacaggacactgctggtagcgagttactgccacaagcaaaagatccggaaaccacggcgcagtggattgagcgttgccttgctggcagcgaaccgattcccgaaagcctgaaaatccagatggcttgctgcctggtggctacgggtgaagcggcaactatcagcgacggcctggcgcgcgttaatcaggcattttaattcttttctcagccggatgagccatgtcatccggcttttaccccaccgcaatatgaaattcctgcatctttattgaccttcccacgcccggcgtgcagcataaaaatacaacaaacacataacataaacaggagttaaccatggaaagtggtcatcgctttgatgctcagacgctgcacagttttattcaggctgtatttcgtcagatgggtagcgaggaacaagaagcgaaattagttgccgatcatttaatcgcggcaaacctggcagggcatgatagtcatggtattggcatgatcccaagctatgtacgctcctggagtcaggggcacctgcaaattaaccatcatgccaaaaccgttaaagaggcgggggcggcggtcacgctcgatggcgatcgcgcatttggtcaggtcgcggcacatgaagcgatggcgctggggattgagaaagcgcatcagcacggtattgccgccgtggcgctacataacagccatcatatcggccgtatcggttactgggcggagcagtgtgcagcggcggggtttgtctctatccactttgttagcgtggtcggtattccaatggtcgcgccgttccacggtcgcgacagccgctttggcaccaatccgttctgtgtggttttccctcgtaaagataatttcccgctgttgcttgattacgccaccagcgccattgcatttggcaaaacccgcgtcgcctggcataaaggcgtccccgtgccgccaggttgcctgattgacgttaacggcgtgccgacgaccaatccggcggtaatgcaggagagcccgttgggtagcctgttgacctttgccgaacataaaggctacgcccttgcagcgatgtgtgaaattcttggcggggcgctttccggcggtaaaacgacgcatcaggaaacgttacaaaccagtcccgatgccattcttaactgcatgaccactatcatcatcaacccggaactcttcggcgcgccggattgtaacgcgcagaccgaagcctttgccgagtgggtgaaagccagcccgcatgatgatgataagccgattttgctaccgggcgagtgggaagtgaacacgcgtcgcgaacggcagaagcaggggattccactggatgcgggaagctggcaggccatttgtgatgcagcgcggcagattggtatgccggaagagacgttgcaggctttctgtcagcagttagccagctaaaaaaaagcccgtccagtggcggacgggcaaacaagggtaacataggatcaatgagggttagagcatatgcgtctgtcggcaaacagacagggaaatacttgtgctggacgtagcgtaaacgcctgatccgtccaacggttcggattttgtaggcctgataagacgcggtagcgtcgcatcaggcatctgttgccggatgcggcgtaaacgccttatccgtcctacgaattacttataaattaccgcagtaccgcttaatttattgttgttggtggcggaagtgatgctgtatccactggcaccggctgccgcggctttctcagccagtttcgcttccagggcatcgagggtggatgcgccatcggcagaaaccacgccgattttattcatgttctgtgcctgggatgccgttaccggttccgccgcgaacacgccaaaactcagagtactaagagccatagcagcaacaacagtattgatagttttcataattaatctctcgcaggtgatttttgtataagtgacgttgtttcgtcgatgtgatgagtatcacgtttttttacgagagataaaatcgaagagaattgaccgccttgttcaaataaattgattgatatctaacctactgataaaccatttatttgttgtacttatgaacttgttttataccgcgtggcagtcacagcagcgttaaaggcacggaatgacacgcaaaatacaaattatactcgctatgcatctcgccagttgtagttaacgtaactggctgtctttgctacctctgcgattatatcctgtataagctggtttttgtaaatctttctcctgctgacaatgaatacataagcgcacgccaggaatggcttcccgacgggcctgcgggatgggggcaccgcactcttcacattcatccaggctttcgccgcgcggaatttcaccccgagcgcgggcaatcgcatcttcaattgtactgttgatctgttcgttgacggcgtcatcgttagcccaaccggatgccatatcgacctccccatatcaatacttgtacagttaagtgtagctaatccagggacgaactcgggcagttcaagcatcagatctcgctccattcccgcagcagattatgataaagattaagcaggctcaggatctcttcactttcgccgtagcggcttttcaggctctgaatattgttgtccagttcaaacagcatggcgcgctttttatcatcgcggatcatgctctggatccacataaaacttgccactcgtacgccgcgggttacgggtgtcacgcaatgcaggctgctggagggatacaacacgagatcgcctgccgggagttttacccgatgttgtccgaaggtgtcattaacgaccagttcgccgccgtcgtagctttgtggatcgcttaaaaacagcgtggcagaaaggtcagtacgcatccagccgttttgtggatggctgcgtactgcgccatccacatggaaaccataggtttcattgttctgatagcgattaaacagcggcgtggaaagggtacgcggcaaggccgcggcaaagaataaagcatgttggttaaccgcgttcagcacctcattttgcagggcggcgtataacgtgctgcgggtgtcgacctgttgattgttcttaacttgcgcaccttgtgcgccggtggtgacgcgtccatccacccattcggcttgttccagttgttcgcgaaaacgagcgacgtcctgtgggcttaacacgccgggaatgtggtacatcatacaatttctccaaaaagtggggcctgcgccccacatctgaatcagaaatgcatattggctgtgagcaagaaggttcttggctcgcccgggtgataacggtagccgctcttgttgatactggcgacgtaatcggtatcaaacaggttgtaaacgtttagctggaagtcgagattgcgattaactcgataccccagtttggcatcggcgacccagtaaccttcggtaaacgctggcgttcccaccgcgccgtcactacctttatgcatactgccgatatagcgtgcgcccgcgccaacagagatatcgtcggttgcctgatattggctccataaggtgaaggcgtgctccggggtatacggcaggctactggaaccatcctgggcaacatctttgccgtttttgatggttgctttttgctgggtatagccgccaatcacctgccacgcgggagtgatattcccggccacggatatctcatagccttcgacgcgtttcttaccgtattggctgtaagttccgtcatcattttgctcaacttcattttcgatatcagtgcggaacagcgcggcggtgagcaacagacgtttatccagaacctgccatttggtgccaatctcgctggtgttggctttttgcggtttaaaatcggtgcggttggcactgttaccgctgccagactgcgcaagggcgaagttgttgccgcccggaggctgctgggaaacggcatagttaatatagacattgccgttttccgtcaggtgatacagcgccccggctttccagttcatcagattgccgctcttggcggtgtcgacggtggtgaccggagaaccttttgccacaccagttgggcaggtgatggcaccgcgtccgctgccgccgcaggcggtggcactgtcatattcagtatgataattatccagacggatcccgccgttcagctcaaaatcacgggtgatttgcagcgtatcaaaggcgtaaattgcgaaggtatccgtctgaccattggcgtttgcgccgttgcgcgtcaggccgccgggatgaatgctgctgtcaggatgataaatatttaccgcgggtaacgtcaccggattaacgccgtagttagtctgcgtttcacgggtaaattccacgccggtactgacatcatgaccgatagaaccggtatagaacgtgctggtcaggttggtctggttggtgagaattttattactcacatctttggtattcgccgtgcgactccaggtccagctattcacatcgctggtgggctgagtaatattgctcgccccgcccataatcgccgtcatcaggtaatcctgctttacgcggctccaacgggtagtattgcgaatggtggtgttatcgttgatgtcgtgctcaaaacgcatggtggcggtgtcggtggtgctatcgtcgtaatcggaatccgtgccgtaaaagttatgagtatcaacttttccggaatgattcagggccgccgttcccgcagatggggcagaatagcccggcaaaccgatggtcggaatgccgccgtctggcgtgttgtgctgggtgacatgcagataattaagatacaaacgattcgctgtaccaaggccaaaagcgacagaaggggcgacgccgtaacgctcatttttgactttgtcgcgtccggcatcgtgcgttttttcgcccattacattcaggcgcaccgcggtggtatcaccaatgacctgattgacgtccagcgtgccgcggcggaaccaggcgctgccaatactggcggaggcgtcaatgccggaatcattgcgcggctgcttgctgatcatattgatgctgcctgtcggtgcgctgcgcccgtagtcggtgccggacggccctttaatcacttcgacctgctcggtattgaaggtgtcgcggctgacgctgccgatatcgcgaatgccatcaatataaatactgttagaggtatcggcaccacgcatataaatggcgtcgccagtggtggagttaccgttctcacccgcaaaaaacgcacccacgccggggacgtttttgagcgcgtcggtaaggttggttgcgccctgatctttaatcacttgttcagaaattaccgtcatcgtgcgggtagtatccgctaccggacggctgaatttcggatcggcagattgttgtggcgcataaaggctaggcgtacttgcttcgacaaccagcgtgtcatccgcgttagtttgcccttcggcggcgagtgcctgagccacaggcgtgatgccaatacaaagaccggcaaagaacgtgaggctatgaaattgtctggcagggaaattgcgattgttttccattttgcaggtgactttttcttatatgttgaaattttcactgccacgagaaagcctctctgcggatgcgatgccactgttaatcccgtgatagtgctcgtgaaagtgataataattttgataagcattatcacttggagcgattttctatcacccattgcgcgaaaaagaaatacatttatttacattgagttcatatttgatgttttttgattacaaaacagacgaaaactgcatccagaggcgaatgcagttacgttggtggggttatttgtagatggttgcagtaccgaacatctggtcatttccgcctgcggaattaatgacataacctttcgcgccttgttcgcgcgctttttctgccagtttatcctccagatcgcttaggttacttgcgccagttgcgctaacggtaccggcgggccgtagctgaccgctgtccaggttactcatcggttgcgcggcataagccgtgagagagattccgctcaggacggtggcaatcagtagtgtgaggcactttttcataatgacatcctcataaatacaacgggtagtgcctgataagtgtaggtcgcctgcgcgatgcaaatgacgcaaaaaattgacagagatgtgcttattttttgaacgatatatttttacaaaataagacaaatcaatgacatgcataatgctgatttttatgatgaattgccataaaccatagccatgttaaggttttggggaatgataaacgcagccagatatttaccctgtcgcgttatgcgggtatcttacgccgctgcttaaaggagaatgctatgtccgcccagaaaccggggttgcatccgcgcaaccgtcatcacagccgctacgatctcgccacgctttgtcaggtcaatcctgaactcaggcaattcctcacgcttacacccgccggggagcaaagcgtagactttgccaatccgctggcggtgaaggcgctcaataaggcgttgctggcccatttttacgccgtagcgaactgggatatccccgacggttttctctgcccaccagtaccgggccgggcggattatattcatcaccttgccgatttactggcagaagcaagcggaacaattccagcgaatgccagcattctggatatcggcgttggtgcgaactgtatttatccgctgattggcgtacatgaatatggctggcgttttaccggtagtgaaaccagcagccaggcgttaagcagtgcgcaggcgattatcagttctaatccggggcttaaccgcgccattcgtctgcgtcggcaaaaagagagtggggcgatttttaacggcatcatccataaaaacgagcaatacgacgcgaccttgtgtaacccgccattccacgattccgccgctgcggcacgggcaggtagtgagcgtaaacgccgtaacctggggctgaacaaagacgatgcactgaactttggcggccagcaacaggagttgtggtgtgaaggcggtgaagtcacctttatcaaaaagatgattgaagagagcaaaggcttcgcgaagcaggtgatgtggtttacaagtctggtatctcgtggtgaaaacttaccgccgttgtatcgtgccctgacggacgtgggcgcggtgaaggtggttaaaaaagagatggcccaggggcaaaagcagagtcgctttattgcctggacctttatgaacgacgagcagcgccgccgttttgtcaatcgccagcgttaaagcgttggttcccccggcggtaacggttcagccggggtcgcgcccggagcaggcagcacctgataagtctgcactggcgcgcgaacgcccgccaggtcgaaatgttttttcacctggctgtcgagggcaaagcgtaccgtccactgtttgagtggcagcgtggtgaagctaacacgcagtgtaaacgcggtattgcttaagccgacaatcccggcaaaattcggttcaccaataatcagcccgcgaatttcttcgttttccattaattccgctaccgcatctttcagtgcctgattggctttatcagcatcttcatggcgatcaacatcataatttgccaccacgctaccaatgccgcggacaaagttagcaaaggtggttatgctagaccacggaatgatgtgatacgccccggtatcctgtcgtacgcccacggagcgaatgctcatccgttccactgtgccggtcaacggcccgatagtcaccaaatctccagtgttcatgccgttttcaaactgaataaataccccggtgataatatctttcaccagcgtttggctaccaaagctgatagccagacctaatgccccggcacctgccagcaatggcgcgatattgacgccgatttcgctcaacacaatcatgatggtgatggtactgataatcaccgccagcgcgttacgaaacagcgtaagcagggtacgcgtgcgggcgctgggtagcgggcggccatgaatatcgctagccagccggttttcgatcaaactggcgagcaccgtccagccaaccgcgctgaagaaaagaatgagtgcgatacggatcaggatatctacggttttctgccccgcgccgttttgcagccagttccagaaatcgaacaatccccatgcgctcaacagcaacattaccgccacgcagactgtcagaatacgcgccgttttcagcgccgcgctcagccagccattcaaccgtttttgcagctccggatagttacgctgagtatgtgggctgagagtgatggttttcgccagccagcgggaaaacataccggaaacaaacgctgcgataccaataatcgccaggctgcgcaccgttgcacccatcataaatttcaggctgttgcccggatcgaacaagctaaagaaaaacagcacgataaaataggcgcttgccagccagtgccacaccagcgcaaaggcgcggataaacaggctgaaaaaggccaggctatgctccgcgaagttgagcaaatgctgggtaatctcttttttattacgaaagatcaggtacaacgcccagacggtcatgcacagcataatgatgacgttcgccagcgcacctatctgtacattcacctgattagagataatcggcacggccacaatcaggccataacctatcaaactgcttaaccagctcaggcgacgactccagtaacgggcgctctcgtcctgaatcgtgaacgggcgcagctccgccacgtttgggcaaaaaatcaggcgtagtacggctttgaaaaattcaatgagggcaaaggcgttgagaaacaaactttgttggaaagcgatggtgcgactgcctgcattcaggttgtcgcttaatacctggccgacaaataatgtcagggccagtaacagcaggtcgataataaacgccccgataatcatcgccggaagctgcaaccagttactgcgctcacgatttttttgccgcgcccactgacccattttgcgatacagcggcagtgcgcacaggcgaatcagccagtaaaaaccaaacactaataccgctaacatactaaaatgggtcagcgcattgctgaaggtttgtggattaaacggcttatgcggggagccggtgatattgcgataaagttgcccgaagcgggcggaaagggcttcaccataatggcggctgacttcggtgaccttttgcagcacggtttgctcttcgaccagcgtcggcggcactatttttggtaccggttcagcagggggcgtagcggcaacggtgcgcaactggtcgatcaactctttacggctggtgtcattatccagcacatccgccagtgcgccataggccgcttttttttgttcgatatccggttccggggccggttcagtcgtactgtccgttgtcgttgtggttgtaacgccgggtatggataccgcgtgggcaggtgcgcccagcaggcagaagaggatgaacaggatccaccgcatgactcctccagtgagaaaatagagcaaaaagataagtatagatgctggaggaggggcgattttaaatgagaggaatctggtgtgcctccctttcgggtgaaagggaggaagggatattaagcaggttgctgacaacgtgcgggcttttttgccggatgcggcgtgaacgccttatccgtcctacaagttcatgcaattttaataagttgccagatatcctgtaggcctgataagcgtagcgcatcaggcaatgtgtcttattaagagacgtgctgcaaaaattcctgcaagcgctggctcggcgggttcttgatcaacacctgcggattgccatcttccgcaatccggcctttgtcgataaagatcagccggctagctactttctcggcaaaaccgatttcgtgggtcacgatcaccatcgtcatcccttcttcagccagatcctgcataaccttcagcacttcatggcgcagttccgggtcaagagcggaagtcggttcatcaaacagcatcattttcggcttcaccgccagcgcgcgggcaatcgccacacgctgctgttgaccaccagaaagttcggaagggtagtgatgtgcacgttctgccagaccgactttcgccagcagctcacgtgccagtttttccgcctcttctttgttcgcgccacgcacgcgtagcgggccaaacatgacgttttccagcgctgtcagatgcgggaagaggtaaaactgctggaacaccatacctgcttcctggcgaatcaggcgctcgtcaactttcggatcgttaaccttcaggccatcgacaatcagatcgccggaggtgatttcttccagtttgttgatgcagcgcagcagggtgcttttaccggaaccggacggcccgataatcaccacgacttcgccctgggcaatgttcaaatcgatattgtgcagcacctgggttgggccaaagtgcttggagacgtttttaaattcaatcacaggattttcatccttctttccagacgacgcagaataaagctcagcaccagggtaataatcagatagaacaccgccacggcgctccagatctcaagggcgcggaagttaccggcaataatttcttgcccctgacgggtcagttccgccacgccgatcacaataaacaggctggtgtctttaatgctgatgatccactggttacccagcggcggcagcatacgacgcagtgccagcggtaaaatgacgtagcgaatggtttcccaacgactaagaccgagcgccagtcctgcttcacgaaaacctttgtggatagacagcaccgcaccacgcgtgatttccgcaatatacgcgccggagttgatcatgatggtgaccaccgccgcagtaaatgggtcgatgcgtaagtcgttaaacgccatcggcagggcgaaataaataaacatcacctggacgacgataggtgtgccgcggatcacttcaataaagaccagcgcgacgtggttggctatccaacctccgaaggtgcgtgcaaaacctgccagcaatccgattaccagaccgcctgccagaccgaggacgctaatccacagggtcattttggcaccttcaatcagaagcggaatggcaggccagatggcactccagtcaaactgcatatgttgttcctgttaccgtggtgtaaataatcaaattcagggtaattaatggccccggagcgggtttgcgcccctcaccctaatcctctccccataggggagagggaactgccagtgcgttttacaggtgtagcgttattatttcggttcagtaccgaaccattttttgtagatttcgttgtaagttccgttctcgcgcagggttttcaacgcgccgttgactttgtcacgcagctcgtcgctacctttcgggaacgcaataccgtattgctgcgcttccagagagtcacctaccgctttgaactgaccgttaccggcggttttgatgaagtacagaatgtttggcgtatcgtgcagaacggcgtctgcgcggttggtgcccagttccatataggcgttatcgatgttcgggaactgacgcagatctttagttttgatgtttgctttcgcgtaatcaacggagccagtaccgctcttcacagcaaccactttcccgtcgagatctttcacgcttttcacatcgttattgttagctttcaccatcactaacaggccgcttttgtagtagccgtcagagaaatcgatcgcttttttacgctcgtcggtgatggtaatgcccgccagcgccagatcgacgtttttggtttgcagtgccggaatgatcccactgaaatccatcggcttcagttcgtaatccagcttcagctctttagcgatggcagcccacagatcaacgtcaaagcccacatatttatcgccctgtttaaattcaaacggaacgaaggcggtatccgtcgcgacaactaattttttatccgcggcatgagaagaaaccgcaaaagccagggtcagtgcagccagactaacttttaatacagacttcatagcatttccttttttctatccacgggacgatcccctgcgtgacattcacatatatgaaaaaatcgtgccagttttgcaactccttgatttttcgagatgcggcaaaaacgtgatgcacgatttatagggcaataccctgaagatgcaccattctggggcaccaatctggtgcgctaaaattgtgcactcaacacagtgattatttagcgtaaaacctgatgaaaaaacaatctttatgtaacgattgtgtgatgatgtggatacaaaaaatttacttaatcagctggagatagcagatggatgcactaaataagtgcgttgaggtgggctgcaaaacaaaacggcctcctgtcaggaagccgcttttatcgggtactaaagttctgcaccatcagcgatggatttattcgatgttagactcgataaaccacaggaatttatccaggtcgcgagacgcggcggtcaggatatctgcggtgtcgtcatctttcgcttcgccaatcgctttgcgtacgtcattagcgacgattgcgtaacggtcagccagttctttcaggtgatcctgaacgttgtggatgtccagcgggtaacttttcagcggggttttgctgttgataacttgagtggtccccagagctacaccgcccagctgcactgcacgttctgccatggtatccagatgatcgatcagtgcggtgcggaagccatccagcatttcatgtacggcaatgaagttagcgccgcgcatgttccagtgcgcttgtttggtaatcaaagaaagatcaataaactggataacctggcgattcagcaactctactgttgcttttttctcgctgtcggagacatcgttgcgggtataaagcagattggtcgctttacttttaactaatttagcggtactcataatttcatatcctcttgatgttatgtcccagtaattaacgagattaagtatagcaccggctatgtgttccgctattctggctgttcctatcacactaatagtggtaacaagcgtgaaaaacaaaactaataaagattcaatgagttagatatattgataagaacaattcttatttatctgctcgccaggaattttcggaataaatatgcttttgcataattcgatatataaagacggtgtagaggaaaagtagcgagaaattctgcatggttatgcataaccatgcagaaatgtaaatttaattaatgtctaattcttttattttgctctctttgcgtactgtcagcgtagaccccatactagcggcgatgatagcgccgagcgccagtagctgtatgggtgtcagtgtttctccgaggaaaatcatcccggaaacggcagccagcgccggttccatgctcatcagcgtaccaaatgtccgtgttggcaaacgggtgagggcaatcatttccaggctataaggcagagcggtgctgagaatagcgacagccagacccaatggaataacgctccagtgccagagtgcttcaccagcctgaagcgctccaattggcacgaaaattaacgctgcaatcaagctaccaattgccaccgtcgcagggccatgttccgctcctgcgcgttgcccacttaaaatgtaaatagcccaacaagccccggcccccagtgccagcgcacagccggttaaatcgacatgggaaacgtcttgccccagcggtagcaggaaccacagaccaagaaccgccagcacaacccagacgaaatctaccgggcgacgagaagagaacagcgccaccgccagtggtccggtgaactccagcgccaccgcaatacccagcggtactgtctgaatagaaagataaaaaagataattcatcccacccaggctaacgccgtaaaacaacagcggtaaccgttgctctttggcaaagcgcagtcgccatggcttaaagaacgcgatgaggatcagcgttcctaatgccagacgcagcgcagtgacacccggtgcgcccaccagaggaaaaagactcttagctaagctggctccaccctgaatagacgccatggcaacgagcaatatgactattggtaaccagaccggcattttacgtaaactaccaggcatcctttctcccacaaatatctagacttaagtaaagcgtggagtgtactggatatacccaatgctggttgagcatttgttgaaaaaattttcccccgttttgactaaaatgcgccaggattgatggaatcattagtctggtgattaggaataatctggatgaatgacagggaaaacatgcgtaatacttacgcagttctctgaaaaagtgatttaaatttagatggatagcggtgtatggaaacgttctgttacatgaaatggcccgttagacatcacaaatcgcgaagagtttcccattaatttttgatatatttaaaacttaggacttatttgaatcacatttgaggtggttatgaaaaaaattgcatgtcttagtgcactggccgcagttctggctttcaccgcaggtacttccgtagctgcgacttctactgtaactggcggttacgcacagagcgacgctcagggccaaatgaacaaaatgggcggtttcaacctgaaataccgctatgaagaagacaacagcccgctgggtgtgatcggttctttcacttacaccgagaaaagccgtactgcaagctctggtgactacaacaaaaaccagtactacggcatcactgctggtccggcttaccgcattaacgactgggcaagcatctacggtgtagtgggtgtgggttatggtaaattccagaccactgaatacccgacctacaaacacgacaccagcgactacggtttctcctacggtgcgggtctgcagttcaacccgatggaaaacgttgctctggacttctcttacgagcagagccgtattcgtagcgttgacgtaggcacctggattgccggtgttggttaccgcttctaatcactttggtgatataaaaaatccgcctctcggggcggatttttgtttttaaggtttcgggtcgaaaatatcggttccgagatggttgtaatccaccttctgtaactggaagttggtgatgtatatcggcccggctttcttctcagatataaacgggtatttgatgttaatttccttcgctttaatccccgtccactgggagaaaaagcctaagaagtcattggcactgcggcgggctttaatcacacgatgcgctttatcgtcgctggaaatgaccataaaaggcacctggaaattttgctgatatttatcatcatgggcaaggtattgcacgtctttaccgcgctctttaaaggccagaccgtggtcagaaaagtaaaccaggctgaagctgctgccgctgttgcgtaactgatcgtacagcttgcgcagtaaatcgtccgtttgcgtcatggtatagagatagcagctcgtttctttgctttgcacaaaggtttcgtattttccttgtgtcctgtcgcaggcctgcggatgactgcccatcagatgtagaacaatcagctgcggttggctgtgctcttgcgccagcacttgagcggtcatatccagtaacgcttcgtctttggtgtttttatctgcttcaaaattaccttctttcaggaagtacacttcatctgctcgtttggcgatgctggcgatagcggtatcgtattcgccgatttgaccctggttggaaaaccaccaggtctggaagcccgcgcgatttgccagggtgacaaagttatcctgaaactgtggtttgccatcgacaacgcgattgagcgttaagccaaggcttttctgcgtggagccactggcggcaatgtagtcagcaaatatcaaaccgttaacgctgctggcaaacggggtattgtcccagtgaccgccaaaggcaccgagggcatcgcgacgcgcgctttcaccgatcaccaccacataggtctgatacttcggcttaacggcagtgaccgtccaggtatctttcattccggaaagttttgccatccgttcttgctcttcaatcacctcgttattattgacgatgacatccttagcaaaacgaaataccggatagccagtatctttcagtttaaatacgccaccccaggccaggttttgcacgggagcaacaaaaaatgtcgccacactgaataccagacacaggctgtcgaaggtattccagcgcgctttttcattctctttttttcgcctgattgctattacgccgagcgcaaaaataaataagccgaccaggtagctgtaccacggaaaaatcgtcaggatttcggtgctctcttccatattggtggagtgcaatgccagcaatgtattgaaattaggcgcgccgtaggcctgagcaaaagggaaataacaagccgccaccaggctactgacaccgaccagaactttttgtacgcgaggcaatgttcgccatagcaaaagcaaaatagccgtaaacgcagcggtgtagagcaaactgaaggggtaacctaagccgaggttaattaataggctctgtaaaaagtagaacgcagtccacgggctaaatacccggctacgggtaacaaggctttctttgagggttaaattcatatgccactatcgtaacaaacgccatgtgcttaccctggcgtcaagggtcaatacctgcaagagtgcgtgaagagtggaaaggggtccgcatccgcgagccgcaatatacgcagggctgcaagaagatagagcgagccgccgtagtggtcaactactgacgaacaaatcttttgcgaaggggattgcaaatccgacaaaaagtggggtttttcagaccaaaacgcgttatgcctgcatgaaagcaggagtgaagcggcgtaccgcgacgccgctatttatcggaaggtttatcttgctgcggtttgttgttgaccatatcgcacaacatagagagcagcattaaccgtactttaaagggagaatgactaaacacgcgcatacacctcttgaactcattcataagacctcctgacttgctaatcccgtcgatccttgaggggtgattgcattacatacagatatagcacaggctatattatatagctattgctaaaacgttaattttttgtaccttcgcaactctggtttacaatgtgcgcacgaaatgagaacgctatgtatgcgtcaccataatgaggaagcacaatgagtcgtcgcgcaggtacgccaacagcaaaaaaagtgacgcagttagtgaacgtggaagagcacgttgaagggttccgccaggtcagagaggcgcatcggcgcgagcttattgatgattacgttgagctgatttctgacttgatcagggaagtgggggaagctcgtcaggtggacatggctgctcgtctgggagttagccaaccgacggtggctaaaatgcttaagcggctggcaaccatggggctgattgaaatgatcccctggcgtggcgtgtttttaacggcagaaggagagaagctggcgcaggaaagccgcgagcgacatcagatagtcgaaaatttcttgttggtgttgggcgtcagtccggaaatcgcccgtcgcgacgcggaaggcatggagcaccatgttagtgaagagacgctcgacgcttttcgtttgtttacccagaaacacggtgccaaatgagcctgccttttttacgcacgctgcaaggcgatcgtttttttcagttattaattcttgttggtatcggattaagctttttcgtgccctttgcaccgaaatcctggcctgctgctatcgactggcacaccatcatcaccttaagcggcctgatgctgctgaccaaaggtgtggagttaagcggttattttgatgtgctggggcgcaaaatggtgcgccgctttgctacggagcgtcggctggcgatgtttatggtgctggcggcggcgctgctttctacctttctgaccaacgatgtcgcgctgtttattgttgttccgctgactatcacgctaaaaagactgtgtgagatcccggttaatcggctgattatttttgaggcgctggcagtcaacgctggtagcctactgacgccaattggcaacccgcaaaatattcttatctggggacgttctggtcttagctttgccggatttattgcccaaatggcaccgctggctggcgcaatgatgctgacgctcctgctcctgtgctggtgttgtttccctggaaaggcgatgcaataccatacgggggtgcaaacaccggagtggaaaccgcggctggtgtggagttgtctggggctgtatatcgtctttctgacggcgctggagttcaaacaagagctgtggggactggtgattgtggcggcaggctttgcgctgctggcacgtcgcgtggtgctcagtgtggactggacgctgctgctggtgtttatggcgatgtttatcgacgtccatttactgacccagcttccagcgttgcaaggcgtgttgggtaacgtgagtcatctatctgaacccgggttatggttaacggcaatcggtttaagccaggtgatcagtaacgtgccgagtaccatattgttgctgaactatgtgccgccgtctttattactggtatgggcggtaaacgtaggtggctttgggttattacccggaagcctggcaaatttgattgcgctacgtatggcgaacgatcgccgcatctggtggcgtttccatctctatagtataccgatgctgttgtgggcggcgttggtgggatatgttttgttagttatactcccggccaactaaggtctggcaaataaaaaaggcggattatgagtccgccttttgctttaagttttgaagattaattcagacgaaccggcatcccggagcggtttttaatcgcttcatcaagaacaacctggtcaacatctggctgaccggtcactgtctgcacgctcttcgtcagggtaattggcacaatttcctgaccttcaaactgggcttcggtggtagacagcgggttatggacttcaatataacggctgccgtctggctcggtggtcgcttttaccggctcatcaataaactgtacgcgggtaccgaccggtactttctcgaacaggaatttgatgtcttcgttacgcagacgcacacaaccatgacttacacgcaggccgataccgaagttggcgttggtgccatggatagcatacaggcgaccgatatagagtgcatacagccccatcgggttatccggacctgccggaacgacagccggaagcggttcgcccgcagcgcggtactctgcgtgcattttggcggtcggcgtccaggtcgggcctgcttttttacgctcaactttggtggtccagttgataggcgtatctttgcctaactgaccaatgccgatcggcagcacgataacggtgttggtccctttcggatagtaataaagacgcatctcagcactgttaatgacgatgccttcatgaacggtatccggcaggatcagctgctgcggaatgttcagtacagtaccgcctttcggcaggaaggtatccacacccgggttcgcttccatcatattggaaagccccatctggtactcggcggcaaaatactccagcggctgagtgttaccttcaggaatggtgatcacctgattctgaccaaccaggcgactcccgtcggttggcagaggataagttaccgcagaggcggtactgcaaaagccgacaacagcgaaggccgctgcgaataatgttttcaatttcatattcatgttaagcgagattttgtgcctggcaggccattgggttgagaatattagagtattggaagcgcattataagttcattccagctcacagtgaaatcagatgtgtacgaaatcacattttttgcctttggcttgagtgtagaccttaagcgaggagcaggatcttctttcagacttatggcataatgcgcggtttgtcatatctcttttcaggatacgcctgtgttagtttccagtaacgtcaccatgcagttcggcagtaagccgttgtttgaaaacatttccgtcaaatttggcggcggcaaccgttacggcctgattggcgcgaacggtagtggtaaatccacctttatgaagatcctcggcggcgaccttgagccgacgctgggtaacgtttccctcgatcccaacgagcgcattggtaaactgcgtcaggatcagtttgcctttgaagagttcactgtgctggatacggtgatcatggggcataaagagttgtgggaagtgaagcaggagcgcgaccgcatctatgctttgccggaaatgagtgaagaagacggctataaagtggccgatctggaagttaaatacggcgaaatggacggttactctgcggaagctcgcgccggtgaactgttgcttggcgtgggaattccagtggaacagcactacggcccgatgagtgaagttgctcctggctggaagctgcgtgtgcttctggcgcaggcgctgtttgctgatccggatattctcctgctcgacgaaccgaccaacaacctcgacatcgacaccattcgctggctggaacaggtgctgaacgagcgtgacagcaccatgatcatcatcagccacgaccgtcacttccttaacatggtctgtacccacatggcggatctggattacggcgagctgcgcgtttatccgggtaactacgatgagtacatgacggcggcgacccaggcgcgtgaacgtctgctggccgataacgccaagaagaaagcgcagattgctgagttgcaatctttcgttagccgctttagcgccaacgccagcaaatctcgccaggcaactagccgcgcgcgccagattgataaaatcaaactggaagaggtgaaagcctccagccgtcagaacccgttcatccgttttgaacaggataagaaactgttccgtaacgcgctggaagtggaaggtctgaccaaagggtttgataacggtccgctgtttaaaaatctcaacctgctgctggaagtgggtgaaaaactggcggtactgggtaccaacggcgtcggtaaaagtacgctgctgaaaacgctggtgggcgatctgcaaccggacagcggcaccgtaaaatggtctgagaacgcgcgcattggttactatgctcaggaccacgaatatgagtttgaaaatgatctgaccgtgttcgaatggatgagccagtggaagcaggaaggcgatgacgagcaggcggtacgcagtattctcggtcgtttgctgttcagccaggacgacatcaaaaagccagctaaagtgctttccggtggggaaaaagggcggatgctgtttggtaagttaatgatgcagaagccgaacattctgatcatggacgaaccgaccaaccacctggatatggaatccattgagagcctgaacatggcactggaactgtatcagggcacgctgatctttgttagtcacgaccgtgagttcgtaagctccctggcgacccgcattctggaaatcaccccggaacgcgtgatcgactttagcggtaattacgaagattacctgcgtagtaaagggatcgagtaagtgattatccgtcaccccgatactgtcggggtgacggcggctgatgacaaatgcaaaatagcctgatgcgctacgcttatcaggcctacgcagtacctgcaatatattgaatctgcaggactttgtaggccggataaggcgttaacgccgcatcaggcattaacaaagcgcatttgtcagcaatctgagtaacgtcgaatcgattttcttaatcccacatcaattcacttccattaattctcaaacatccatgcccaacgctcgcttaccgtgaatgttgaggtcggcaagcgtaaagcgtccttcccagtttgtttcatagtcctcgcgcgggaagtcgcccgggcttgcgcctttttccagtgcggccttcaccttgtgcgcgtaggcaagatttttctcgcacatcggtgccgcaggaatgtacatcacgttgccccaaccttgttgattttcaacgggggcaacggaatggatgacgtcgcagtgccaccagacggagtctccggcttcgagttttggaatgctggttaacgcctcaatcaacagtggatgccattgctcacttaccggcaatactcttccgggcgctacgccgcacagttcatcctccggcacatcatcaagcagcggacgtaacagtacgtacgccatagcttcaggaatgggcacgacgtgcagcagcccctgaccaggcagcatatcagagagcgctgtccagccctggaatgtccgaaacacggaacatttggtggtgttgtccaccgtgtactcttcaacttccgtacgatgtgccgcatgccagggatcatattgcgccagattgccattaaagacgttggcgaaaacgcgctgatacgctggaagcagccagcgttccagtgccccggagtcggtatgcgctccaagacctttggaggtcgttccgggcggacggcggcggatacggtcagggtagatgacgctcacatccgggttaaaccattgctttccatcactttcaaatgtccacagacgattgagaaagctctgcgcattcgccatttcttcactctggcgggcctgcatttgcgcctggctccagtagatggggtaaatctcgggacgactagcgctgagcgtcccgaagaaattatcgccggggcctttgtagacctcgtcaaagcggttgcggtccagatagtccagcatgctctgatcccagcctagcgcttgttcgcgggggaaatggccttttatcaccgcacaaccgcgacgtttaatctgttcgcgctgctctgcagtaacatgacctgctttgatatcggcataagacagcaccggccagacggcatcgccctgtgctttgagtgcgttgatttcagccactcgcgtggcaatgtcatcgcttagctgattaaagatctgctggacgtcgccaagctgcgcccgcagcgcgtgcttcatctgacggatagctgctttgtgatcggcaggcaatgtgtcgctggtaaaagtagaagccataaccacctctcattaactttcattcgaaaccattctgatttgcatgtgacaatataagttataaataagttaatgcaagtttaatgatttgatgtgatgtacaggatgtaaaaagaagggaaaaccggagcgcacggctccggtagagaggtcagctgttaaaaggggatgtgttatccagcaccgcctgaatcacattcagcgcgccttcatgattattatcatcggtagcgtaacgggcgatttgtttaatgttttccgcagcattgcccatcgcaaaggaataacgcgccattttcagcatctccgcatcgttaccgctgtcgccaatcgctaccacattttgcggactcagatcccagcgtttcagtaaccggctaataccgtttgctttatgtagaccgggaataatcaggtcgataaagccaaaaccactggtaacgggtttcataatgccatcgagcgctacgtgcagtttgtcgatcactaacgggatttgttcatccggcaggttgaggctaaacttgaacagtacgtcgtcaatctcctgataatcttttacaggtttcaggcgatggtagtgttttgccatcagtgcgacaaatgcttcgggggcattttcgctgacatatgcactttgcagaccgcaggcgacaaaattgagttgcttatcttttagcaactcgccaataacaatccggctttcatgtcgggtcagttcgccgtggaacaactgcttgccatgttcgtaaaccagtgcgccgttttccgcgacaaaagagatctcatcctttagctcaggaaagaaactaataagctggtaatactgattaccgctggcaacaacgaacttaatgccgcgctttttcagttcctgatattgcgccataaaacgtggttggttgtacgttttggcgtcgttaagaaaagtaccgtccatgtctgtgacgataacttttacgctcataggtgtgctcctggctcgaaaatgaaaccgtaacagtgtaataacaatgtgacgcagagcacaaattatatttcgaatgaaagtaaggatgaaattgatgatgtgaatgatttagcccggcgacgacgccgccgggccgaggagattacagcatatgttcagtacgggcgatgatatcgtcctgagcgtctggagagagcgcggtgaagaacgcggaatagcccgcgacacgcactaccagatcgcgatactgatcgggatgttttttcgcatccagcagcgtttcgcgggaaacgatgttgtactgaatatgccagcctttatgcacttcaaagaaggtacgcagcaggatcatcagtttctgcttgtcagattcgttctccagcgttgccggattcagtttctggttgagcaacacgccgccgagaatcgctgccgtaggcagtttacccacactgccaatgaccgcagtagggccaagatggtcagtaccggaggccgggcttgcgccttctgccagcggggtgtgggctttacgcccgtccggtgttgccatagtctgcgcgccaaacggtacgttagcggagatactactcgtacccgcgtaatagttgccgccaaccggaccacgaccgtagcgcggattatggtactgtttcagttcgtcgatataggtctgataagcgcgagccagcagcgtatcgacagtatcatcgtcgttgccgtacttcggcgcaccgttaatcagccgctgacgcagctgctcgtgagtcaggccgtcgaagtcatctgccagtgcggcagcaagctgttgctgaccaatcgcaccttgttcaaacaccagtttcttcactgccgccaggctgttgccgaggttggcaatgccgacctgcaggccagaaacccagtcatatttcgcgccgccttgcttgatacttttcgctcgctcaatacagtcatccaccagcgcgctgcagagaatatcgtgcacgttctcttccagcatggtgtcgacgacatattcgatttcgatacttttgcgggtgtagtaacggatttgcgtatcccacgcgtccatcacttcatcgaagttgttgaagttacctgcgctcaacgctttttcttgtggcaggaacactttgccgctggtggcatcatgcccgccttccagcgccgccagcatcacgcgggcgaagttgataaagctcatgccggtacagcgatagccccatttgccaccgacggcggtttctatacaaccaatcgctgcgtagtcataagcgtcctgcggttcaataccgagtttaataaattccgggatcacgatttcgtcgttgttgaacgccggcatcccgaagccgcaacggatcacctgtacgcaggcgtcgaggaaatcgttgctcattcctgcatggtaacgcacgctgaggttaggctgagtggaacgcaggcgaccgcaggattcgaggatcgcgtaagagagtggattcaccgcgtccattggttgaccatcaaccagattttgcccgccaatagtgacgttctgatacagcggacttcccgcagaggctttactgtgactgccggagcggatcttgttcacttccagcagtttcagccagcagctatgcagcatctcgatggcgtgttcgcgatccagcgtctggttgagttcaacgtcgcggcgatagtacgggtagagatactggtccatacgaccaaagcttacactgtgaccgttagattcgatctgcaaaatcaactggatgaagtaacacagttgcagcgcctgccagaaagtctgcggcggctggtgggcgataagatcgcagttttctgccatcgccagcagttcatcgcgacggctttcgcgggtttcggtcgcggccatttcacgcgccagggcagcgaaacgttcaatgtgttcactgactgccaccagcacgatatcaatcgctttcaggaattgctcaccgtgtaaatcttccagcaccgtcaggttgatgcggctgcgacgttccgctacttcctcgcgcagaccatcaagccctttttccagcagcagcgggaaattcaccgccaggtgcgcatcgccggaggtcatattgccttccgctttaatgattccggtcgccagcagacctttttgctcatcggtaaacatgccgtagcagcgatcctgtacggtctgaccgcgccaccacgggcacacttcatgcagaacgcgtttgttctcttcgctcaccgcaaagccagcaccgggacgatctgccagatcatcaatctctttttcgatccagctgacagtatattccgggaagatcggcgcggcgcgaacttcgcttgcctggttgccaatgatcaactcatcgtgtttgatccagatggtgcgattcgccaggtgatgcgccagtgccagcgcgcgacgtaccgggatcggcttatcgagatgttgttgatacatctcggtatagtgctgcgcgcgctcggtacagactggcggtttcacaatatgcaccagcgcatttttgtgcgctttaatgcggtcgctgagcgtgtccagtttcagtgtggtcatggttgttatcctcgtaaggtcgcggttaaccctttctggcaggcatactgctgggcaaagtcgagcagttctggcgcatcaagcggtttttccggggcgtcatagggcagattaagtaagtgatatttgttgatgcccagcgtgtggtagggcagaaaatgaatttcgccaacgtgcagctcgtcggcggcaaaatcggtaatggcttttacagaggtttcgtcggcattaaagccctgaatcagcggcacgcggataatgatttttttgcccgctgcggcgagttttttcaggttatccagcactctggcggcgttaccgtcggtccactgtttaaacggcgcgtcggcaacgtgttttaaatcggcaagaaacagatcgatatagggcagagaaggggcgatatatttccacggcacatgcagacaggtttctaccgcagtatgaatgcctgcctcgtggctggcttgcagtagcgccatcgccatttccggctgcataaagggctcaccaccgctaagcgttaaaccgccgccgctgcgatcgtaaaacggtttatcgcgcagaacggtcgtcatgatctcctcaacgcttttcacttcaccacacacggttaatgcctgtgtcggacagcagtcggttaacgccgtcagatgctccggggttaacttttcccgatgaataagcaaaccattcagcgcgcgctcaatcacttccggcgcggccttagcgcacagctcgcagccttccagacacagtcgtgcgtcatacagcagatcctgcgtgcgggcgcggctttccgggttctgacaccagcggcagcccaggctacagcctttaagaaatacgaccgtgcggataccggggccatcatgggtgctgtagcgctgaatattgaaaatcatagttgcctctctatttcgttcaagcattaaaatactttcgaatgaaagttagattgatgtgcgtcaactgttcagagagttttcccgtgatagtctacattcagacaaaaagtacattttgaggatggttatggaactgtatctggatactagtgacgttgttgcggtgaaggcgctgagtcgtatttttccgctggcgggtgtgaccactaacccaagcattatcgccgcgggtaaaaaaccgctggatgttgtgcttccgcaacttcatgaagcgatgggcggtcaggggcgtctgtttgcccaggtaatggctaccactgccgaagggatggttaatgacgcgcttaagctgcgttctattattgcggatatcgtggtgaaagttccggtgaccgccgaggggctggcagctattaagatgttaaaagcggaagggattccgacgctgggaaccgcggtatatggcgcagcacaagggctgctgagcgcgctggcaggtgcggaatatgttgcgccttacgttaatcgtattgatgctcagggcggtagcggcattcagactgtgaccgacttacaccagttattgaaaatgcatgcgccgcaggcgaaagtgctggcagcgagtttcaaaaccccgcgtcaggcgctggactgcttactggcaggatgtgaaagtattactctgccactggatgtggcacaacagatgattagctatccggcggttgatgccgctgtggcgaagtttgagcaggactggcagggagcgtttggcagaacgagcatttaaccggacgttctgcatcctcataaattgctgatgacgtggcggagtgccgcgtcttatcaggcctggaggtggcaattactgcccacacacctcacaccccggattacgcatcagtttcatttcgcgaaactgacaggtcatcgcatcgtacatgacgattttcccgctggccggtttgccataacctgccagcattttgatcgcttccattgcctgcaagctaccaattacgccgatcaacggtgccattacgcctgcttccacgcaggttaatgcattttcaccaaacaaacggctaaggcagcgatagcacggttcaccgtcctgataagtaaagacggtgatttgaccttccatacgaattgccgcgccggaaaccagcggtaccttcgcggcaaaacagcctgcgttcagttgattacgtaccgcaacgttatccgtacagtcgagcaccagatcgtgttcagcaatcaatgctgcaagttctgcgtcatccagcagtgcattgactggcgtaatcgcgatatgtgggttgatccgcgtcagggcgtcacgggcggattccaccttcggttgcccgaccgtggcatcactgtgcagtgtctggcgttgcagattgctgaggctaaccgtgtcgaagtcgagcagcgtcaggttaccgacaccggcgcttgccagatactggctggctgcacagccgaggccgcccaggcccactatcagcacgcgagaatctttcagcgcctcctggccgtcaaaatcaaagccgcgcagaatgatttgccggttgtagcgcagcatctcctgatcgctgagttccgccattacaggcctccgaacaacgcgttaaacggttctacttccacccattcgcccacttccacattgccgcgatcgcgttccagcacgataaagcagttgccgaggctaaaggagctaaatatatgactaccctgatgtccggtggtcgtcacttccagttcgccatcggcgttgcgttgcagcacgccgcgctggaaatcaagacgtcctggcgtttttttcaggcgggacgctgtgcgtacgcgctggcgcgcgggcaggccgctggcggtgttaccgcttagttttgccagcaaaggctgtaccagttgatagaaggtcagcgtcgcactaaccgggttgcccggcaggccgcagaaccagctattgctgagtttaccgaacgcgaacggtttacctggtttaatcgccagcttccagaaggcgatctcccccagctcttcaagaatcgttttggtgtaatccgcctcacccacactaacaccgccggaactgatcaccacatccgcctggctgtcggcttcaataaatgcggcgcgcagggcatggggatcgtcgcggataatccctaagttaattacctcgcatcccaactgttctaacatcaggtgtacggcgagacggttggtatcgtagatttggccgtcgcccagcggctgaccgggcaactggagttcatcaccggtagaaaaaagcgctacacgcactttacgaatcaccggaacttcggcaatccccagactagcaattactggcagctctgcggtagtcaggcgagttcccgccgggaaaacaaccgcacctgcagagatatcttcaccgcgacggcgaatattttgcccgctacgcacttcagcagtaaaacgcacgccattgtccatttgttcagtctgctcctgcatcaccaccgcttcgcagccttccggcaccggcgcaccggtcataatacgaatgcaggtacccgcaggccattcaccatggtatggctgaccggcaaaggatttaccggcaacgggcagcggttgcccggaggcaatatcggctaaacgcaccgcgtagccgtccattgcggagttatcaaaccccggaacatcaagcgggctaacgacatcgctcgccagaatacgaccaaaacactgtaccagtggcagcgtttcctgggcggtcagtggggtgacgcgagaaagcatctcattaagcgcggtgtcgaggctcatcaatccggtggtaaattccatgaaaacactcctgcggaggcaaaatcgaatttgcctattatgtcagaaaaacgccacagactgtatgccacctcgggcgtagcgctgggtcctgcctttacatgccatatccatctttctatattcaaaaattgaatgagtaattcataaaaattctgatatttatagcaaaagtggcgaaccacccttaatggacgaatactatgggcaaagcagtcattgcaattcatggtggcgcaggtgcaattagccgcgcgcagatgagtctgcaacaggaattacgctacatcgaggcgttgtctgccattgttgaaaccgggcagaaaatgctggaagcgggcgaaagtgcgctggatgtggtgacggaagcggtgcgtctgctggaagagtgtccactgtttaacgccggaattggcgctgtctttacgcgtgatgaaacccatgaactggacgcctgtgtgatggatggtaacaccctgaaagccggtgcggtggcgggcgttagtcatctgcgtaatccggttcttgccgcccggctggtgatggagcaaagcccgcatgtgatgatgattggcgaaggggcagaaaattttgcgtttgctcgtggcatggagcgcgtcagcccggagattttctccacgtctttgcgttatgaacaactactggcagcgcgcaaggaaggggcaaccgtcctcgaccatagcggtgcgccactggatgaaaaacagaaaatgggcaccgtgggggccgtggcgttggatttagacggcaatttggcggcagccacgtccacaggcggaatgaccaataaattacccggacgagttggcgatagtcccttagtgggtgccggatgctacgccaataacgccagtgtggcggtttcttgtaccggcacgggcgaagtcttcatccgcgcgctggcggcatatgacatcgccgcgttaatggattacggcggattaagtctcgcggaagcctgcgagcgggtagtaatggaaaaactccctgcgcttggcggtagcggtggcttaatcgctatcgaccatgaagggaatgtcgcgctaccgtttaacaccgaaggaatgtatcgcgcctggggctacgcaggcgatacgccaaccaccggtatctaccgtgaaaaaggggacaccgttgccacacagtgatgaacttgatgccggtaatgtgctggcggttgaaaatctgaatattgcctttatgcaggaccagcagaaaatagctgcggtccgcaatctctcttttagtctgcaacgcggtgagacgctggcaattgttggcgaatccggctccggtaagagtgtgactgcgttggcattgatgcgcctgttggaacaggcgggcggtttagtacagtgcgataaaatgctgttgcagcggcgcagtcgcgaagtgattgaacttagcgagcagaacgctgcacaaatgcgccatgttcgcggtgcggatatggcgatgatatttcaggagccgatgacaagcctgaacccggtatttactgtgggtgaacagattgccgaaagtattcgtctgcatcagaacgccagtcgtgaagaagcgatggtcgaggcgaagcggatgctggatcaggtacgcattcctgaggcacaaaccattcttagtcgttatccgcatcaactctctggcgggatgcgccagcgagtgatgattgcgatggcgctgagttgccgcccggcggtgctgattgccgatgagccaaccaccgcgctggatgtcactattcaggcgcagatcctgcaattaatcaaagtattgcaaaaagagatgagcatgggcgttatctttatcactcacgatatgggcgtggtggcagagattgccgatcgggtactggtgatgtatcagggcgaggcggtggaaacgggtaccgtcgaacagatttttcatgcaccgcaacatccttacacccgtgcgctgttagctgctgttccgcaacttggtgcgatgaaagggttagattatccccgacgtttcccgttgataagccttgaacatccagcgaaacaggccccccccatcgagcagaaaacggtggtggatggcgaacctgttttacgagtgcgtaatcttgtcacccgtttccctttgcgcagcggtttgttgaatcgcgtaacgcgggaagtgcatgccgttgagaaagtcagttttgatctctggcctggcgaaacgctaagcctggtgggcgagtctggcagcggtaaatccactaccgggcgggcgttgctgcgcctggtcgaaagccagggcggcgaaattatctttaacggtcagcgaatcgataccttgagtcccggcaaacttcaggcattacgccgggatattcagtttatttttcaggacccttacgctagcctggacccacgtcagaccatcggtgatagcattatcgaaccgctgcgtgtacacggtttattgccaggtaaagacgcggctgcacgcgttgcgtggttgctggagcgcgtgggcctgttacctgaacatgcctggcgttacccgcatgagttttccggcggtcagcgccagcgcatctgcattgctcgcgcgttggcattgaatccaaaagtgatcattgccgacgaagccgttagcgcgctggatgtttctattcgcgggcagattatcaacttgttgctcgatctccagcgtgatttcggcattgcgtatctgtttatctcccacgatatggcggtggtagagcggattagtcatcgtgtggcggtgatgtatctcgggcaaattgttgaaattggtccacggcgcgcggtcttcgaaaacccgcagcatccttatacgcgtaaattactggcggcagttccggtcgctgaaccgtcccgacaacgaccgcagcgtgtactgctgagcgacgatcttcccagcaatattcatctgcgtggcgaagaggtggcagccgtcagcttgcaatgcgtcgggccggggcattacgtcgcacaaccacaaagtgaatacgcattcatgcgtagataacattcaggcggagaataaaatggcaagagctgtacaccgtagtgggttagtggcgctgggcattgcgacagcgttgatggcatcttgtgcattcgctgccaaagatgtggtggtggcggtaggaagcaatttcaccacgctcgatccgtatgacgcaaatgacacgttatctcaggccgtagcgaaaagcttttaccaggggctgttcggtctggataaagagatgaaactgaaaaacgtgctggcggagagttataccgtttccgatgacggcattacttacaccgtgaaattgcgggaaggcattaaattccaggatggcaccgatttcaacgccgcggcggtgaaagcgaatctggaccgggccagcgatccggcgaatcatcttaaacgctataacctgtataagaatattgctaaaacggaagcgatcgatccgacaacggtaaagattaccctcaaacagccgttcagtgcgtttattaatattcttgcccatccggcgaccgcgatgattagtccggcagcgctggaaaaatatggcaaggagattggtttttatccggtgggaaccggaccgtatgaactggatacctggaatcagaccgattttgtgaaggtgaaaaaattcgcgggttactggcagccaggattgcccaaactggacagcataacctggcgtccggtggcggataacaacacccgcgcggcaatgctgcaaaccggtgaagcgcagtttgctttccccattccttacgagcaggccacactgctggagaaaaacaaaaatatcgagttgatggccagtccgagtattatgcagcgttatatcagtatgaacgtgacgcaaaagccgttcgataacccgaaggtccgtgaggcgctgaattacgccattaaccgtccggcgctggtgaaagttgcctttgcgggctatgcaacgccagctactggtgtggtaccgccaagtatcgcctacgcgcaaagttataaaccgtggccttacgatccagtgaaagcgcgcgaattactgaaagaggcgggatatcccaacggtttcagtaccacgctgtggagcagtcataaccacagcaccgcgcagaaagtgctgcaatttacccagcagcagttagcgcaggtcgggattaaagcccaggtgactgcgatggatgccggacagcgggcggcagaagttgaaggtaaagggcaaaaagagagcggcgtgcggatgttctacactggctggagcgctagtaccggcgaagcggactgggcactaagcccgctgtttgccagccagaactggccaccgacgctgtttaataccgcgttttacagcaataaacaggtggatgacttcctggctcaggcactgaaaactaatgatccggcggaaaagacccgcttatataaggcggcgcaggatatcatctggcaagaaagcccgtggatcccgctggtggtagaaaaactggtgagcgcacacagtaaaaacctgaccggtttttggatcatgccagacaccggcttcagctttgaagacgcggatttgcaataagcaacgcagggagtggaatgcttaattacgttatcaaacgcttactggggttgattccgacgctgtttatcgtcagcgtgctggtgtttttatttgtccatatgctgcccggcgatccggcgcgattgattgccgggcccgaagctgatgcgcaggttatagaactggtgcgtcagcagctggggttggatcagccgctgtatcaccagttctggcactatatcagcaatgctgtgcagggggattttggcctgagcatggtgagccgtcgtccggttgccgatgagattgccagccgctttatgccaacgctgtggctgaccataaccagtatggtctgggcggttatatttggtatggcggcgggaattatcgccgccgtctggcgtaaccgttggccggatcgattgagtatgaccattgcggtgagcgggatcagctttccggcatttgctctggggatgcttttaattcaggtattctccgttgaactgggctggctgcctaccgtgggagcagacagttggcagcactacattttaccctccctgacgctcggcgcggcagtggccgccgtgatggcgcgctttacccgcgcgagctttgtcgatgttttaagcgaagattatatgcgtaccgcgagggcgaaaggggtgagcgaaacctgggttgtcctcaaacacgggctacgtaacgcgatgatcccggtagtgaccatgatgggcttacagtttggctttttgctcggtggttccatcgttgtggagaaagttttcaactggccgggacttggacgcttactcgttgactccgtagaaatgcgtgattacccggtgattcaggcggaaattctgcttttcagcctggaatttattcttatcaacttagtggtggatgtgctttacgccgccattaacccggctatcaggtacaagtaaggatgcgactatttaactggcgacgtcaggcggtgttaaacgccatgccactggtcaaacctgaccaggtacgtacaccgtggcatgaattctggcgacgatttcgccgtcagcatatggcgatgaccgccgcattattcgttattttattgattgtggtggccatttttgcacgctggatcgctccctatgacgccgaaaattattttgattatgacaatctgaataacggaccttctttgcagcactggtttggcgtcgatagtctggggcgtgacattttcagccgtgtcctggttggtgcgcaaatcagcctggcggcgggcgtgtttgccgtgtttatcggtgcggcgatcgggacgttgctgggcttgctcgctggatattatgaaggctggtgggatcggctgatcatgcgcatttgcgatgtgctgtttgccttcccgggtattttactggcgatcgctgttgttgcggtgttgggaagcggcattgctaacgtgattattgcagtcgccattttttccatccccgcgtttgcccgcctggtgcgcggcaacacgctggtgttgaaacagcaaacctttattgagagtgcacgcagtattggtgccagcgatatgaccgttttgttgcgtcatatcctgcctgggaccgtctcttctatcgtggtgtttttcaccatgcgcattggtaccagcattatctctgccgccagcctcagttttctcggcctcggtgcgcagccgccgacaccagagtggggagcaatgctcaatgaggctcgagcggatatggttatcgcgccgcatgtcgctgtttttccggccctggctatttttctgaccgtactggcgttcaatttgttgggcgatggtttacgcgatgcgctggatccgaaaattaaaggataattacgtttgaatattgcttgaaagggtaatcacctcacaggaaattattgccctaagcaagtgttgtaactttctgctgattttgtagaatcgggtaatttggttaaaaagccgcagcaagggacaatttttgcagcggcacagcgttcagatagttattttgttaaatgtattaacatgctgagtttatacgaaaagataaagataaggctgataattttatttttattggcagcactgagttttattggtctttttttcatcattaactatcaactggtaagcgagcgcgcggtaaaacgtgccgatagccgctttgaacttattcagaaaaacgttggctatttctttaaagatattgaacgtagcgccctgacattaaaggacagtctgtatttattaaaaaatacagaggagattcaacgcgccgtgattcttaaaatggaaatgatgccatttttagacagcgtgggactggtacttgatgataataaatattatctttttagccggagggcgaatgataaaatcgttgtttatcatcaggaacaagtaaatggaccgcttgtcgacgagagtgggcgggttatttttgccgattttaacccaagcaaacgaccgtggagcgtggctagtgatgactctaacaacagctggaatccggcatacaattgctttgatcgtccgggtaaaaaatgtatctcttttacgctacacatcaacggcaaagatcacgatttgttagcggtggataaaattcatgtcgatttaaactggcgatatctgaacgagtatcttgatcaaatcagcgctaatgatgaagttctatttttgaaacaaggccatgagatcattgccaagaatcaactcgctcgtgaaaaactgattatttataatagcgaaggtaattataatattattgattctgtcgatactgaatatatcgaaaaaacaagtgcggtgccaaacaacgcattattcgaaatctatttttattatcctggcggtaatttattgaacgcaagtgataaacttttttatctgccgtttgcgttcattattatcgtattgctggtggtttatttaatgaccactcgtgtgttccgtcggcaattttctgaaatgacagagctggttaatacgctggcgtttttgcctgacagtacggatcaaatcgaggctctgaaaattcgtgaaggcgatgcgaaagagattatcagcatcaaaaatagcatcgcggaaatgaaagatgccgaaattgaacggagtaataaattgctcagtctgatctcttacgatcaggaaagtggttttattaaaaatatggcgattattgagtctaacaataatcagtatctggctgtggggatcatcaaactgtgtggtctggaagccgtggaagcggtgtttggtgttgatgagcgcaataaaatcgtcaggaaattgtgtcagcgaattgccgagaaatatgcgcaatgctgcgatatcgtgacattcaatgccgatctctatttacttctgtgtcgggaaaatgtacagacatttacccgtaaaatagcgatggtaaacgattttgacagcagctttggctaccgcaatctgcgcatccataagtctgccatttgtgaacctttgcagggggaaaacgcctggagttacgcagaaaaactgaaactggcgatttccagtatccgtgaccatatgttcagtgagtttattttctgtgatgacgcgaaactcaacgaaatagaagagaatatctggattgcgcgtaatattcgccatgcaatggaaattggcgaactattcctcgtctatcaaccgatcgttgatattaacacccgcgccattctgggcgcggaggcgttgtgccgttgggtgtctgcggagcgggggatcattagtccgctgaagttcattaccattgctgaagatatcgggtttatcaatgagctgggttatcagattattaaaacggcaatgggtgaattcagacattttagtcagcgtgcgagcctgaaggatgatttcttactgcatattaatgttagcccctggcagttaaacgaaccacactttcatgagcgttttaccaccatcatgaaagaaaatggcctgaaggcgaacagcctctgtgttgagatcactgaaaccgtgatcgagcgaattaatgaacatttttatctcaatattgaacaactgcgtaaacaaggggtacggataagcattgatgactttggcaccggtttgagtaacctgaaacgtttttatgaaattaatccagacagcataaaggtggacagccaattcaccggcgatattttcggtactgcgggaaaaattgtgcgcattattttcgacctggcacgctataaccggatcccggtgattgcggaaggcgtagagagcgaagacgttgcgcgcgaattaatcaaattaggatgtgttcaggctcaggggtatctgtaccagaaacccatgccattctccgcctgggataaaagtggaaaattagtaaaagagtaatttacgtatgtccagaatcaataagttcgtacttacagtcagtctgctgatttttatcatgattagtgcagttgcctgcgggatctacactcaaatggtaaaggaacgggtgtatagcctgaaacagtccgttattgatactgcttttgcggtggcaaatattgctgaatatcggcgtagcgtggcaattgatcttatcaacacgctaaatcccacggaggaacagctgttggttggtttgcgcacagcttacgccgacagcgtttccccctcttatttgtacgatgtcggtccttatctgatttccagtgacgaatgtattcaggtaaaggagttcgagaaaaattattgtgcagatattatgcaggttgtgaagtatcgacatgtcaaaaatacagggtttatctcttttgacggtaaaaccttcgtctattacctctatccggtaactcacaatcgtagtctgatatttttgcttggtctggagcgtttttctttactgagtaaaagcctggcgatggacagcgagaacctgatgttctctctatttaagaacggtaaaccggtgaccggtgatgaatataatgctaaaaacgccatcttcaccgttagcgaagcgatggagcacttcgcctatttgccgaccggattgtatgtatttgcgtataaaaaagatgtttatttgcgggtttgtacattgattattttctttgccgcattggtggcagtgataagcggtgccagttgcctctatctggtacgcagagtgattaatcgtggtattgtggagaaagaagccatcattaataaccattttgaacgcgtactggatggcgggcttttctttagcgctgccgatgtcaaaaaactctacagtatgtataacagcgcgttcctggacgacctgaccaaagcaatgggcagaaaatcctttgacgaagatttaaaagcgctgccggaaaaaggcggttatttgtgcctgtttgacgtcgataaattcaaaaacattaacgacaccttcggtcatttgctgggcgatgaagtgttgatgaaagtggtgaaaatccttaaaagtcagatcccggtagataaaggtaaagtctaccgcttcggcggtgacgaatttgcggtgatttatacgggtggaacgctggaagagttgctaagcattctaaaagaaatcgttcatttccaggtgggaagcattaatttaagtaccagtatcggtgtagcacatagtaatgaatgtcctaccgtcgaacgcttgaaaatgctggcggatgagcggctgtataagagtaagaaaaacggcagggcacagattagctggcagtaatcattattcgcaggccggacaaatgattttgcccggcctgaattaattaaacccggctaccccacaaatcgtactcatcggcgtgctcgactttcacacgcaggatatcacccggcttaacgttggtttcaccattgagataaaccgcgccgtcgatttccggtgcatctgccatgctgcgaccaatcgcgccttcttcgtccacttcgtcgataatcaccagaatttcacggcccactttctcttgcaggcgctcggcggaaatctgctgctgcagctgcatgaaacggttccagcgttcttctttaacttcttccggaacctggtcaggcagggcattggcgtctgcaccttcaaccgggctgtatttaaagcagccaacgcgatccagacgcgcttctttcaggaagtcgagtagcatctggaaatcttcttctgtctcgccagggaagccgacaataaaggtactgcgtagggtcagttccgggcagatttcgcgccactgtttgatgcgcgccagttggcgatctacagaacccggacgcttcatcagtttgagaatgcgcgggctggcgtgctgcaacggaatgtccagatacggcaggattttgccttctgccatcagtgggatgacgtcgtccacatgcggataagggtaaacgtagtgcagacgtgtccagatccccagtttgcttaactgttcgcacaggctgaccatgctggtttttaccggctcgccgttgtggaagccagtacgatgtttaacatcaacgccataggcggaagtatcctggctgatcaccagaatctctttaacgcccgcatctaccagacgtttcgcttcacttaacacttcgccaatcggacggctcaccaggtcgccgcgcatagacggaataatgcagaaggtgcagcggtgattacagccttcagaaattttcagataggcataatgacgcggcgtcagtttcacaccttgttctggcaccaggctcaggaatgggttgtgtttcggttttggcacgtagtgatgaacgtgctccagaacctgctcatagctatgaggcccggtgatttccagcactttcgggtggacttcgcggatctgatcttcttttgcccccagacaaccggtcacaataaccttgccgttttcattcaacgcttcaccaatggcttccagactttcttgtaccgcgctgtcaataaagccgcaggtgttgacgatcaccatgtccgcatcgtcatagctcggtaccacgtcataaccttcagtgcggagttcggtgagaatacgctcactatcaacaaggtttttcggacagccaagggaaacaaagccgattttcggctggggagttactttgctcatagcttaaaaaatattcagttacaggaaaggtcagggcagggattctacagagttctggataaaatttgtatcgcaatctcattcgctggcggaggcgaaggaaatgtaaattttgttaattcggcgtgaagaattgatcctggacagcattttgctcaaaaaatagccatactatttaattgcaacaaggctgggaagaggaggatcgaagtatgttcgttgacagacagcgaatcgatctgctgaaccggttgatcgacgcacgcgttgacctcgccgcatacgtgcaactgaggaaggcaaaaggatacatgtccgtcagcgaaagcaatcatctacgagataacttttttaaactgaatcgcgaactgcacgataaaagcctgcggttgaatcttcatctggatcaggaagagtggagtgctcttcatcatgctgaagaagcattagcgacagccgcagtatgtttgatgagtgggcaccatgattgcccgactgttattaccgtcaacgccgataagcttgaaaattgtctgatgagcttaacgctgagtatccagagcctgcagaagcacgccatgcttgagaaggcctgaaaactaagggggagaaagcgtctcccccttcatgtttaagtttttgtaaaaatgaatttgttatctcctccactgactacgctttaagccagagtcaatccggaggcgttatgcatcgacaatcctttttccttgtgccccttatttgtctttcttccgctctctgggcggctcctgcaacggtaaatgtcgaagtactgcaagacaaactcgaccatccctgggcactggcctttttacccgataatcacggtatgttaatcactctgcgcggcggcgagttgcgtcactggcaagcaggaaaaggattatctgcgccgctttccggagttccggacgtttgggcgcacgggcagggcggcctgctggacgtggttttagcgcctgattttgctcagtctcgccgcatctggttaagttattccgaagttggcgatgatggcaaagccggaactgctgtgggttatggccgcttaagtgatgatctcagtaaagtgaccgacttccgcaccgtctttcgccagatgccaaaactgtctaccggcaaccattttggcgggcggctggtattcgacggtaaaggttatctttttattgctctgggcgaaaacaatcagcgcccgacggcgcaggatctggataaattacagggcaaactggtgcgtctgaccgaccagggcgaaatcccggatgataatccttttataaaggaatccggtgcgcgcgccgagatctggtcttatggcattcgtaatccgcaaggaatggcgatgaatccgtggagtaatgcactgtggctgaatgaacatggcccgcgcggtggtgatgaaattaatatcccgcaaaaaggcaaaaactacggctggccgctggcaacctggggaatcaactatagtggctttaagataccggaagcgaaaggggagatcgtcgccgggaccgagcaacctgttttttactggaaagatagccccgctgtgagcggcatggccttctataacagcgataaattcccccagtggcagcaaaaattatttattggcgcgctgaaagataaagatgtcattgtgatgagcgtcaacggcgacaaagtgacagaagatggccgtattttaacggacagagggcagcgaattcgtgatgttcgcactggacccgacggttatttatacgttctcaccgacgagtccagtggggaattacttaaagttagcccacgcaattaactaacgggaatcatcaccactttgcgcactgcggggcgttcagtgagttgctgataccagcgttgcagatttggacgcggtgtccaggtcaggccaacgttaaacaaattgtagatgaacggtgcgatagcgatatcgcccacaccaaactcgtcgccagagaaccattttacttttgccagttccgcatcgagcagggcaaacagggcgtcgcactctttgcaactggcatcaatggcggcctgatcgcgctcttccggtggtgttctgactaatcccatcaggatcccgcgatgagcattactgagcgtctggtttgcccagtccatccatttttccgcttccgcacgacgtgccggactgtcgatccacaggcgtttttgcccgtactgtgccgccagatagcggacaatggcgttactttcccaaagaatgagatcactttcgtcgtcacgcaacaacggcaccagcccgttagggttcatcgccagaaaatcagcatcgtgatttatcccaaactcacggcccgcgagaatttgctcataaggtagttccagttcttcgagcgtcagcaatactttttttacgttagtactattattccgaccccacagcgtaatcatactcaccccttttccgacaggcagccacaggctgaacaggactccgatggtgaagtaaagttaacttttaagcaacagctggcaaaaaaatgacaccagaagcagcgaagcggcaggatattgcataaactttaaaaactttaccaacttacggtttctttaagtttgtgtgtgcgttattaatcaccaaacttatcatacggcgatataacgtattttttttgaatggatactcgggtggcatttatgacgcaatactcctctctccttcgtggtcttgcagcgggttctgcatttttattcctttttgccccaacggcattcgcggcggaacaaaccgttgaagcgccgagcgtggatgcgcgtgcatggattttaatggattacgccagcggtaaagtgctggcagaaggcaatgcggatgagaaactggatcccgcgagcctgactaaaatcatgaccagctatgtggttgggcaggcgcttaaggccgataagattaaactcaccgatatggtgacggtcggtaaagatgcctgggcgacgggaaatccggcactgcgtggtagtagcgtaatgttcctcaaaccgggcgatcaggttagcgtggcagacttgaacaaaggtgtgattatccagtccggtaatgacgcctgtattgcgctggctgattacgttgccgggagccaggagagttttattggtctgatgaatggttatgccaaaaaactgggtctgaccaacactaccttccagacggtgcacggcctggatgcgccggggcagttcagcaccgcgcgcgatatggcattgctgggtaaagcattgatccacgatgtgccggaagagtacgccattcataaagagaaagagttcaccttcaacaaaattcgtcagcctaaccgtaaccgtctgctgtggagcagcaatctgaatgttgatggcatgaagacaggaaccacggcaggcgcgggatataatctggttgctagcgctacccagggcgatatgcgtttaatctccgtagtgttgggggcgaaaaccgaccgtatccgttttaatgagtctgagaaattattgacctggggtttccgcttctttgaaaccgtgacgccaattaaacctgatgccacctttgtgactcagcgcgtctggtttggtgataagagcgaagtgaatctcggggcaggtgaagcgggcagtgtgaccataccgcgtgggcagctgaaaaacctgaaagcgagttatacgttaacggaaccgcagcttaccgcaccgctgaaaaaaggtcaggttgtcgggaccattgatttccagcttaacggtaaatccattgagcagcgtccgctgatcgtgatggaaaatgtggaagagggcggattctttggtcgggtgtgggatttcgtgatgatgaaattccatcagtggttcggcagctggttctcttaatcttctgataaccggatggcgcgaaacgtcatccggttatacgtcattaatacatcaacttaatgcgctgcgtctgcgcgtacttcacatactcatcttccgggcaacaatcgctcaccacaatatcaaagcgtttcaggtcacccatgcgcgccggacgcaccttgccaaatttactgtggtcgacaaccagcacatgcttttgcgccatgctcatggcccagtgttttaccggcaactcttcaagattaaaacaggtagcgcctttactgacatgcacgcccgccgcagaataaaaagcgatatccgggcaaaaattattcagcgtttgctgaaaatcgatgggtttgaaaatggcgttgctggcgtgaaattcaccaccgcaaagaaacgcgcggcaatggggtttctctttcagcgccagaaaggtatttaggctataacaaacggcggtaaaagggatttcattatcaatcgcttcaataatccacggcgtggtggtgccacagtcaaaaaagagggtctgatcgggttctaccagcgtcgcagccagttttgccgcccggcgtttttcttccaccaggcgggatttttgatcgcttaacaggtaatggctggcactgcgcggttccagaacaatatagccgccgagcaaaacgacgggcgcactgtggttgttcagatcgcgacgaatcgtcatctcgctaaccccaagcagggcggcggcgtctttaagatgtaacttatcgctgcgttttaattcttgcagcagctgcccgatacgctcttcgcgacgtgtttccataatccctctgaatagttattgaagcgagccgctcaatactacactttttagcagagatcagtcacgcacccagcctttgcggatcggtaatgcaaaacagacgcgataccagctttgcagacgttgatagagtttatgccccatcgcttgccagataatctgggcactaaggcagccaatcatacctgccagcaatccaccgagcatatccagcggccagtggacgccaagataaacgcggctccaggcaatgacgacggccagcaccattaaaagactgccggaccacaggcgatgccagcataaaaatgccagtgcaaaggtgaaaatcaccgtaccgtgatcgcttgggaaactgtcatccgccgcatgatgcaggaagttatagccgatattttcgacaaagggtcggtcgtgcggaaaaagatgtcccatcgtccaggacacaaacaggctgaccgccagcgcgatagcgatttttatcaccagttgccgttgtgctgtaagcccccacaaccaaagtaccacggccagcaacggcaccacggtaatcaaatctttagcaataaaaatcgccaagctgatcatccacggagcgctgtctggcgtcgcgttaataagagagaatagagagagattcaaattttccagcataacttcccgacgcaaagtgattaaaagggagccaatacaggcaagtcgttgagaataaagtgcaggttaaactgggtaaagcggcatcgtcttatttccctcaagcggcctgtttacggtgggtgattgtaacgggcataggttaaataaaacttaaagaaagcgtagctatactcgtaataatgtaagaatgtgcttaaccgtggtttcagctacaaaattcgctttctcgttagctgcgcttttattaaactctgcgcgattattattggcgaagaaattgcatgcaaaataaattagcttccggtgccaggcttggacgtcaggcgttacttttccctctctgtctggtgctttacgaatttagtacctatatcggcaacgatatgattcaacccggtatgttggccgtggtggaacaatatcaggcgggcattgattgggttcctactagcatgaccgcgtatctggcgggcgggatgtttttacaatggctgctggggccgctgagcgatcgtattggtcgccgtccggtgatgctggcgggagtggtgtggtttatcgtcacctgtctggcaatattgctggcgcaaaacattgaacaattcaccctgttgcgcttcttgcagggcataagcctctgtttcattggcgctgtgggatacgccgcaattcaggaatccttcgaagaggcggtttgtatcaagatcaccgcgctgatggcgaacgtggcgctgattgctccgctacttggtccgctggtgggcgcggcgtggatccatgtgctgccctgggaggggatgtttgttttgtttgccgcattggcagcgatctcctttttcggtctgcaacgagccatgcctgaaaccgccacgcgtataggcgagaaactgagtctgaaagaactcggtcgtgactataagctggtgctgaagaacggccgctttgtggcgggggcgctggcgctgggattcgttagtctgccgttgctggcgtggatcgcccagagcccgattatcatcattaccggcgagcagttgagcagctatgaatatggcttgctgcaagtgcctattttcggggcgttaattgcgggtaacttgctgttagcgcgtctgaccagccgccgcaccgtacgtagcctgattattatgggcggctggccgattatgattggtctattggtcgctgctgcggcaacggttatcagtagccacgcgtatttatggatgactgccgggttaagtatttatgctttcggtattggtctggcgaatgcgggactggtgcgattaaccctgtttgccagcgatatgagtaaaggtacggtttctgccgcgatgggaatgctgcaaatgctgatctttaccgttggtattgaaatcagcaaacatgcctggctgaacgggggcaacggactgtttaatctcttcaaccttgtcaacggaattttgtggctgagcctgatggttatctttttaaaagataaacagatgggaaattctcacgaagggtaaaaaaatgcctgactgctttgtgcgatcaggcattctcgaattaatggtgatggtcgtcaatctggtgttcgataaccatcccttcacctacgctggcaagatggcgaacataaggatgcgggcggtaagccggagctggcgcaggagccacatagacggtttgcggcacagtcgcgacgctgaccgcttgtggaacgctgacactatcaggaaccacaaccactttgtatccactcggcacatcgacggtgacactttgcgccatcgccacaccagtaaagcccattaaaagcgcgcccaacagtagacaatttttcataatcatttcgcctgaaataatgcagcgggttaatttccgcgaattatgcagccttcattcaggcattgtgttgccgggcgtgctgccggttttattggtcaaatggcgcttcgtgtttaagaactttatcgatcacatccagtacgccttcacggttattggagcctgcgcggtattttgccgctgcgacgaccgcgctaccggcattttccattgcaaaactaaagcctgcctgacgcagcatctcaatatcgttaccgccatcgccaaagaccaccacttcgctgtcgtctattccccataatttctgcagttggcgaaggccattggctttatgtacgccggggataatcagatcgatgctgccgttgccggtgtggacgctcaccataatatcgccgatggcctcatgtaatgctttttgtacttgtggaatcagttcatcggaaagattcaggccaaacttaaagaagatatcctctaagttgtcaaagttatcgacgtattccagacggtgataatacatttccgccaccgttttcatggcatcgtcatattttttgagtgtataggcactattttttccgcaggcaataatttccacttccgggcgcgtcagcaaatgttccacgacagtagcaaacgcatccttgcttagctcgccattaaaaacatctttgccttcgctcactacccagccgccgttttcagccacaaaggcaatttcattagcaatttcagggaagaaagagatcaactgataatattgattcccgctggcgactacaaagcgaattccttgtgctttcatttgctgatactgagccataaaccgctcacggttataggttttttgatcgcttaagaaagtaccatccatgtctaccgcaattaatttaatgctcatcaactattctccatcgccgtctgcgttttggtatcgggtttggcgacggctttcgcgacaatagccgcgagaataaccagcgccagtacaaccagcattgcactacgtaatccataatgttcgccgagatagcccagcagcggcggcccgacgaggaaagccagataaccggtcgttgctaccacactgacgcgggttggtgcatcggggccggtatcgctggcggcagaaatggtcagcgggaagcccaggctggcacccagtccccagagtacaacagacaccccagcgacccaggcgctatcgacaaaaataatcagcccaatacccaacgcccccattagtgcactggcccgaaccacggcaacgcgactgtaacggtcgatgaaccaaccgccggtgaagcgtccaacggtcatccccagggtaaaaccggcataaatcaggctgccggaagtagggctaaaaccgtgaccgtcaaccattaataagggtaaccagtcgttggcagaaccttcggcaaaggccatcgccagcaccacaacacctatcagcagcaactggatatcgcgataaaaaggtacgcctttttcgccatgctgggtgccatcggcagcatttttgcccgtaccgtcagggattgcctgaatggcgatataaataggtgcgatacctaccagcgccgccaataaaatgtgcaccgttgccggaacgccaaaggccgtcagtgccatcccgacacctgcgcctgccagcgtgcccaggctataaaaaccgtgcatcatcggcaaaaccgtcttattcatttctcgctcaacggcagcaccttcaacgtttatcgccacttccgcagaaccaaaacttgccccaaagacgccgagaccaacggcaaagagcagggggcttgtcagccagagtgccagacttaatatcatcatcccgatcaatgcgcaggacatcgtgaccaggatgacattacgtgtcccaaagcgtttcactaaccacgcgctgcagagaataccgctcatgctaccgatgctcagaccaaagagaacaccgcccatttcagcgatgctgacagagagaatatcgcggatagcaggcgtacgggttgcccaggacgccattaacaggcctggcaaaaagaagaacataaacagcgcccaggttcggcgtttcaatgcattacgactagaatttacggtcatagatcacgtcaaaataagaagagggaagacaacattagcaaggttgtgtacatttgtacacaattgcagagagaggaaatgacatgcgtcgcgctaacgatccgcaacggcgagaaaaaattatccaggccacgctggaggcggtgaaactttacggaatacatgctgttacgcaccgcaaaattgctacccttgccggggtaccgttgggaagcatgacctactattttagtggaattgatgagttgttactggaggcgttcagcagttttactgagatcatgtcccggcaatatcaggcattttttagcgatgttagtgatgctccgggcgcatgccaggctatcaccgatatgatctacagcagtcaggttgcaacgccggataacatggagctgatgtaccagctctacgcgctggctagccgaaaaccgctattaaaaacggtaatgcaaaactggatgcagcgcagtcagcaaacgctcgaacaatggtttgaacccggaaccgcccgcgcgcttgatgcgtttattgaggggatgacgctgcattttgtcaccgaccgtaagccgctaagccgcgaggagattttgaggatggttgagagggttgcagggtaatagataagttttagataacaaaaaacccatcaaccttgaaccgaaatggcggggttgatgggctccacaaaatggggacatcaaagaaaagcagtggcactaattaagactgatgccctgcggaaaagttctgcggttgtgcaaaaaaatttcattttcagggcaacttcagttttatcctaatcctggccataccatgacgatgattgtccctgccagcgtcagcaggacgttggcgattgcataggtgcccgcatagcccagcgccgggatgttactgcgagctgtatcactgatgatctccattgccggcgcgcaggtacgtgcgcccatcattgcgccgaacaacagcgcgcggttcattcgcaatacataagcaccgaacaagaaacagataaccacgggcaccagactgacaatcaatccggcaatcaacatctgaccgccaatcgcgcccaggccgttattaataccgctaccggcgctcagaccaacgcctgccataaacaccatcaagccgaactctttcaccatgcttaatgcaccctgcggaatgtaaccgaaggtcgggtggttagcacgcataaagcccagcataattccggcgaataacaacccggcagcgttccccatgccgaaactgaatgtgctgaactggaaggtgatcatcccgatcatcagcccaataacaaagaaggcgcagaatgccagcaggtcagtgacctggctgtgaatgctgataaagccgatgcgatcggcgatggtttttacgcggcgggcatcgccgctgacttgtaaaacgtcacctttgttaagcacgacgttgtcatctatcggcatctcaatctggctacgaatgacgcggttaaggaagcaaccgtgatcggtcaacttcagttgtgcgagacgtttacctacagcgttatggtttttaacgaccacttcttcagtgacgatacgcatgtcgagaaggtcacgatcgaaaacttctttaccgttacggaagctgggatcgagtcgggcatgggcgtcgggatagcctaccaacgctatttcatcgcccatttgtagcacggcatcaccgtctggatttgccagaatcccgttacgtcgaatacgttcaatgtagcagccggtttgtcgataaatacccagttcacgcagatttttgccgtcggtccaggccaccagttccgggccgacgcgataggcgcggatcaccggtaaataaaccttacggttggcatcagtgtccaggccacgttcgcgggcgatttgctgggcgctggtctgtaagtcctgatgctgcaatttcggcaagtaacgcgcaccaacaatcaaactcaccagaccgattaaataggttaaggcatacccgaggctcagattatccagtgccagactgagctgcctgctttccatgccggaatgacgcagtgtatcgccagcaccgaccagaaccggtgtgctcgtcatagagcctgctaacataccggccgtcaggccaatatcccagccaaacagcttacctaaccctaaggcgatcaccagcgcactgccaaccatcaccagtgctaacattaggtaatttttcccatcgcgaaaaaaaatggaaaaaaagttcggtccggcttcgaccccgacgcagaaaataaacagcataaagccaagattaagcgcatcggtgttaatgctgaaatgttgttggcctaataacaggcttacgactaaaacgccaatggaattacccagttggatgctaccaagtcgtaactttccgagacatagcccaagcgcgaggaccacaaataataacagaatgtaattcccatttaacaattcggcgacgtttatattcacggaggctaacttcttgtttactagtaagctgttgaaagaaatggtaatttacgataatgttttttaccagaattcagggcgcagattcattcagcgcacctaaacgatagtaaagtaacaatatattttactagtgtaatcacattaggtatcaacggctatatgaattgcgttggcctatattagcatggaatgcgaagcggctttatcttactgaacgccacactggcgaaaaatgtgttcgatagacgcagtgtcaggaggaacgagtgaaacataaacaacgttgggcgggggcaatctgctgttttgtcctcttcattgtggtgtgcctttttctggcgacgcacatgaaaggcgcttttcgggctgccgggcatcctgaaatcggcttgctatttttcattcttcctggagcagtcgccagcttctttagtcagcgtagagaagtcctgaaacctctgtttggcgcaatgctggcggcaccctgtagcatgctcattatgcggctgttttttagtccgacgcgcagtttctggcaagagctggcatggttactaagcgcggtgttctggtgtgcgctgggggcactgtgtttcttatttatcagtagtttgtttaaaccacagcacagaaaaaatcagtaaagccctcaacgcgagggcttgtcagacgatcaggcgtccagattttctttcacccatgcagcaaaatcggtatagccgccgatatgttgctgatcgacaaaaatctgcggcacggtttctacgggtttacctgccttttgttgtagatcttctttagtgatcccttccgcacgaatatctacatactgatactgaaaatcatcgcgttcattgctcaatttctcagccagatcttttgcacgcacacagtaagggcaaccgctacgaccaaaaataacggtttgcattatttctctcctcatagatttatgcctgtaatgatcacgctaaaatgtattcgctgaaagtaggtttaacctgttgcattaattgctaaaagctataactgttaaacacaatacagtgaaaagttttagactgaaggctcactttgcagagggaagcgtatgcgcgcgatcggtaaattgcctaaaggcgtgttgatactggaatttatcggaatgatgctactggcggtggcgctgctgagcgtaagcgactccctgagcctgcctgagccattttctcggccagaagtgcagattctgatgatttttctcggtgttttgctcatgcttcccgctgcggtggtggttattcttcaggtggcaaaacgtcttgccccacagctgatgaaccgtccaccgcaatatagtcgtagtgaaagagaaaaagataatgacgccaaccattgaacttatttgtggccatcgctccattcgccatttcactgatgaacccatttccgaagcgcagcgtgaggcgattattaacagcgcccgtgcgacgtccagttccagttttttgcagtgcagtagcattattcgcattaccgacaaagcgttacgtgaagaactggtgacgctgaccggcgggcaaaaacacgtagcgcaagcggcggagttctgggtgttctgtgccgactttaaccgccatttacagatctgtccggatgctcagctcggcctggcggaacaactgttgctcggtgtcgttgatacggcaatgatggcgcagaatgcattaatcgcagcggaaagcctgggattgggcggggtatatatcggcggcctgcgcaataatattgaagcggtgacgaaactgcttaaattaccgcagcatgttctgccgctgtttgggctgtgccttggctggcctgcggataatccggatcttaagccgcgtttaccggcctccattttggtgcatgaaaacagctatcaaccgctggataaaggcgcactggcgcagtatgacgagcaactggcggaatattacctcacccgtggcagcaataatcgccgggatacctggagcgatcatatccgccgaacaatcattaaagaaagccgcccatttattctggattatttgcacaaacagggttgggcgacgcgctaaaaccgccacgtcgatgtatgatacgcgggcttttgaccaggtctgacagagaggtgcagggtgaaaattgccatattgtcccgggatggaacgctctatagctgtaagcggctgcgtgaagccgctatacagcgcggtcacctggttgaaattcttgatccgctttcttgctacatgaacataaatcctgcggcgtcttctattcactacaaaggccgcaagttaccccattttgacgcagtgatcccgcgtattggcaccgccattaccttttatgggacggcggcactgcgccagttcgagatgctggggagctatccgctcaatgagagcgtcgccattgcccgggcgcgtgacaaattgcgttccatgcaactgctggcgcgtcagggcatcgacctgcctgtcacgggcattgcgcatagcccggatgataccagcgatttaatcgacatggtcggtggtgcgccgctggtggtcaagttggttgaaggcacgcagggaattggcgtcgtgctggcggagacgcgtcaggcggcggaaagcgtgattgacgctttccgcggtctgaacgcgcatattctggtgcaggaatatatcaaagaggcgcaagggtgcgatatccgctgtctggttgttggcgatgaagtggtcgctgcgattgaacggcgggcgaaagagggcgattttcgttccaatttgcatcgtggcggcgcggcaagcgtcgccagtatcacaccacaggagcgtgaaatcgcgataaaagccgcgcgaacgatggcgctggacgttgctggtgtggatattctgcgtgctaatcgcgggccgttggtgatggaggtgaatgcgagcccggggctggaaggaatagaaaaaaccaccggtatcgacatcgcgggtaaaatgatccgctggatcgaacgccacgctacgacagaatattgcctgaaaacgggtggttaatcgcaatcacattactgatcatggttttgcctgcgctttttgcgtaagctgtgccggtctttttatcgaaagaggttgtacaaaattatgacaagcctggtcgttcctggtctggatacgctgcgtcaatggctcgatgacctggggatgagtttttttgaatgtgataactgtcaggctctgcatctgccccatatgcagaatttcgacggtgtctttgatgccaaaatcgatctgatcgataacacgatcctgttttctgccatggcggaagtccgacctagtgccgtattgccgctggcggcggatttatctgccatcaatgccagtagcctgaccgtgaaagcatttcttgatatgcaggatgataatctgccaaagctggtggtttgccagtctttatccgttatgcagggcgtaacctatgagcagtttgcatggttcgtgcgtcagagcgaagagcagattagcatggtcattcttgaagctaatgcccatcaactgctgttaccgactgatgatgaagggcaaaacaacgttaccgaaaactatttcctccactgataactcctttcgagcacgcagtcgctggtgcagtggctgcgcgctgcaaaattatctgctgtttttaaccttttcttaaagattatttcacttctcttgtgtcgatttggctttatcacatagagcaaatatgcataaaaatttgttaaataccgttttttaatccgagctatagtctcaaaccctggctaaagttattcttgcgatgcttttatatagcgagcagtgctggccgggagaaagttctcttttcttacaccgcgccgataaaaaatatgcacgtttattgcatatctttcagtgtgacaacttttgttcgtttgttaacgaactttcagaaggaaagagatatgaccgccttaaataaaaaatggctaagcggtctggttgcgggtgctctgatggccgtctctgtcggcacgctcgcggctgaacaaaaaacactccacatttataactggtctgattatatcgccccggacacggtggccaattttgaaaaagaaaccggtattaaagtcgtctacgatgttttcgactctaacgaagtactggaaggcaaattaatggccgggagtaccggctttgatctggtggttccatctgccagctttctggagcgccagttgactgcgggagttttccagccgctggacaaaagcaaattgccggagtggaagaatctcgacccggaactgctgaagctggtcgccaaacacgatcccgacaataaatttgctatgccctatatgtgggcgacgaccgggattggctataacgttgataaagttaaagcggtgctgggcgaaaacgcgcccgtcgatagctgggacttgatcctcaaacctgaaaatctggaaaaactgaaaagctgcggtgtctctttcctggatgcgccagaagaagtttttgctaccgtgttgaattatctcggcaaagatcccaacagcactaaagcggatgattacaccggaccggcaacagatctgctgttaaagctgcgcccgaacattcgttatttccatagttctcaatacattaacgacctggcaaacggcgatatttgcgtcgctatcggctgggcaggtgatgtctggcaggcgagtaaccgcgcgaaggaagcgaagaatggcgtgaatgtcagcttcagcattccaaaagaaggggcgatggcgttctttgatgtattcgccatgcctgcggatgccaaaaacaaagacgaagcctatcagttcctgaattacctgctgcgcccggatgtagtagcgcatatttccgaccatgtgttctatgccaacgccaataaagcagccacgccgctggtgagtgcggaagtccgtgagaacccaggtatttatccgcctgcggatgttcgtgcgaagctgttcactctgaaagtgcaggatccgaaaatcgaccgtgtgcgcacccgcgcgtggaccaaagtgaagagcggaaaataatccgcagtcgtagatgccggaggggcgcaccacacccgccggcaattcgcaccattatggtgcgcttgcacacattcaatgccggagagcagccgtgaatgacgctatccctcgcccgcaggcgaaaacccgtaaggcgctgacgccgctattagaaatccgcaacctgaccaaatcctacgatggtcaacatgcggtggatgatgtcagcctgaccatctacaaaggtgaaatcttcgcgctgctgggcgcatccggctgtggcaagtccacgctgctgcgtatgctggcaggtttcgaacaaccttctgccggacagataatgcttgatggcgtcgatttgagtcaggttccgccttacctgcgccccatcaatatgatgtttcagtcttacgcgctgtttccgcatatgaccgtggaacagaacatcgcttttggcctgaaacaggacaaactaccgaaagcggaaattgccagccgggtcaatgagatgctcggcctggtgcatatgcaggagttcgccaaacgcaaaccgcatcagctttccggtggtcagcgacaacgtgtggccctggcccgaagccttgcgaagcgcccgaaactattactgctcgatgagccgatgggcgcgctggataaaaagctgcgtgacaggatgcagcttgaagtggtggatattctggagcgcgtcggtgtgacttgtgtgatggtcacccacgatcaggaagaggcgatgaccatggcggggcgcatcgccattatgaatcgtgggaaatttgtccagattggcgaaccggaagagatctacgagcatccgactacccgctatagcgccgaatttattggcagcgtaaacgtctttgaaggcgtactcaaagagcgtcaggaagatggcctggtgcttgatagcccggggctggtgcatccactgaaagtcgacgcggatgccagcgtggtcgataacgtgccggtacatgtggcgctgcgcccggaaaaaatcatgctttgcgaagagccgcccgccaatggttgtaacttcgcggtgggggaggtgatacacattgcctatctcggcgatcttagcgtgtatcacgttcgtctgaaaagtgggcagatgattagcgcccagctacaaaacgcccatcgtcatcgtaaagggttaccgacctggggcgacgaagtgcgtttgtgctgggaagtggacagctgtgtggtgctgacggtttaaggagcaaagatgagtacacttgaacctgctgcccagagcaaaccgccgggcggatttaagctgtggttgagccagctgcaaatgaagcatgggcgcaaactggtcattgcgttgccatatatctggttgatcttgctgtttctgctgccatttctgattgtctttaaaataagcctggcggagatggcgcgcgctattccaccttataccgaactgatggagtgggctgacgggcaactgtccatcactcttaatctcggtaattttctgcaactgaccgacgatccgctctatttcgatgcttatctccagagcctacaggtggctgcgattagcacattttgctgtttactgatcggctatccgctggcgtgggcggtggcgcacagtaagcctagcacccgtaatattttattactactggtgatcctgccgagctggaccagctttctgatccgcgtttatgcctggatgggaatattaaaaaacaacggtgtgctgaataattttctgctgtggctgggggttatcgatcaaccgctgaccattctgcataccaatctggccgtttatatcggcattgtttacgcttacgtgccgtttatggtactgccgatttataccgcgttgattcgtattgattatagcctggtggaagcagcgctggatctcggtgcacgaccgctgaaaacgttctttactgtgatcgtgccgctgactaaaggtgggattattgccggaagcatgctggtgtttatcccggctgtgggcgagtttgtgatcccggaactgctcggtggcccggacagcatcatgatcgggcgcgtgctatggcaagagtttttcaataaccgcgactggccggtggccagcgcggtagcgatcatcatgttgctgctgctaattgtgccgataatgtggttccacaaacaccagcaaaaaagcgtgggagaacacggatgaataatttaccggtagttcgtagcccctggcggattgtgattttgctgctgggctttacctttctctacgcgccaatgctgatgctggttatctatagctttaacagcagcaagctggtgacggtgtgggccggctggagtacgcgctggtatggtgagttattgcgcgatgacgcgatgatgagtgcggttggtttaagtctgacaattgcggcctgtgcggcgacggcggcggcgatcctcggaactattgcggcggtggtgctggtgcgctttggcaggtttcgcggaagtaatggctttgcctttatgatcaccgcgccgctggtaatgccagatgtcatcacgggcttgagcctgttgttattattcgtcgcgcttgctcatgccattggctggcctgcggaccgcggtatgctcaccatctggctggcgcatgtcactttttgtacggcttatgtggcggtcgttatttctagtagattgcgggaactggatcgcagcatagaagaagcagcgatggatctcggtgcgacgccgctgaaagtgtttttcgtcattacgctaccgatgatcatgcccgcgatcatttctggctggttactggcttttactttgagccttgatgatctggtgatcgccagctttgtttccgggccgggagccaccacgttaccgatgctggtcttttccagcgtgcggatgggggtgaatccggaaatcaacgccctggcaacattgatcctcggcgcggtcggaattgtcggatttatcgcctggtatctgatggctcgcgcagaaaaacagcggatacgcgacatccagcgtgcaagacgtggctgaagacactaaaatttgccaacctggctacataatgccgcgcatgtcgcggcattgttttcatggaagacgaaacgttgggattttttaagaaaacatctagttctcatgctcgcctgaatgtgcctgcgctggtgcaggtggcggcgctcgccattattatgatccgtggcctcgacgtgctgatgattttcaatacgctgggcgtgcgcggtattggcgagttcattcatcgcagcgtacaaacctggagtttaacgctggtctttttaagcagtctggtgctggttttcattgagatctggtgtgcgtttagtctggtgaaagggcgtcgctgggcgcgctggctatatctgctgacacaaatcaccgccgcaagttacttgtgggcggctagcctggggtacggttatccggagctgttcagcattcccggtgaaagtaaacgtgaaatcttccatagcctgatgctgcagaagctgccggatatgctcatcctgatgctgctgttcgttcccagcaccagtcggcggttcttccagttgcaataatgtgtataatcgtcgcccctgatgatgtgaaggtcaatgtatgcagtgcgcactttacgacgcgggtcgctgtcgttcctgtcagtggataatgcagccgattccagagcaactctccgctaaaaccgccgatcttaaaaatctgctcgccgactttccggttgaggaatggtgcgcgccggtgagtggcccggaacaagggtttcgtaataaagccaaaatggtggtgagtggtagcgttgaaaaaccactgctcggtatgctgcatcgcgatggcacaccagaagacctttgtgactgcccgctttatcctgccagttttgcgcccgtttttgcggcgctaaaaccgtttatcgcccgagcggggttaacgccctacaacgtggcgcgtaagcgtggcgaactgaaatacattctgctgactgaaagccagagtgatggaggcatgatgctgcgctttgtactgcgttctgataccaagctggcgcaactgcgtaaggcgctgccgtggttacacgaacaactaccgcagctgaaagttattaccgtcaatattcagccggtacatatggcgattatggaaggggagacggagatctacctgaccgaacaacaggcactggcggagcgttttaatgacgtaccgctgtggatccgtccgcaaagtttcttccagactaatccggcggtcgccagccagttgtacgccaccgcgcgcgactgggtacgacagctgccggttaaacatatgtgggatctgttctgcggtgtggggggctttggtttacactgcgcgacgcctgacatgcagttaaccgggatcgaaattgcaagtgaggccattgcctgtgcaaagcagagtgccgctgaactgggcttaacgcgtttgcaatttcaggcgctggactccactcagtttgccaccgctcagggggatgtgccggagctggtgctggttaacccgccgcgccgcggcattggtaaaccgctgtgtgattatctcagtacgatggcaccgcgttttatcatctactccagctgtaacgcccaaactatggcgaaagatatccgcgaactgcctgggtttcgtattgaacgggtgcagcttttcgatatgttcccgcataccgcgcactatgaagtgctgacgctgctggtgaagcaataaaaaagccgcatgtgcggcttcagattgctgacaaagtgcgcgttgtttatgccggatgcggcgtaaacgccttatccggcctacaaaagcgtgcaaattcaatacattgcatgggccatgtaggcctgataagcgtagcgcatcaggcaattttacctttgtcatcagtctcaagccgcggttgcggctttctgaatcttactgtgggaaccactggtcactgattttttgataagtaccgtcagctttaattgctgccagcgcgttattcagtttttccagcagggctttgttatccggacgtacagcgatgcccaggccggtgccaaaatattgcggatcggtcactttctcagtagcaacaccaagttgtggattggttttcagccattcgtttaccaccgctgtgtcaccaaataccccatcaatacgaccatttttcagatcgataaaggcattctgataactgtcataagagacagttttcacttccgggtgctgatcctgaatatatttctggtgcgtagtaccgttttccatcccaatacgtttgcctttcagatcggcaaacgttttgtaggtatcttttttggcaatcacgacggcactgttttcatagtagggcgtggtaaagcttacctgtttgctacgctccggggtgatatccataccggagattacggcgtcatattttctgaatttcagggacgggatcaggctgtcgaacgcgtgattagtaaaagtacattctgcctgcatttgtttgcacaaggcttttgccagatcgatatcaaagccgacaatctcattattagcacctatagattcaaagggtggataggtggcactaacgccaaaattgattttctctgcggcagaagcaccgaaagtaaaggaagcaagtaaagcggcaagaactaactttttcatgatggaactcccgtctgtcaatcttatgatttttggccgtgtctgcggcatgggataacaatgccatcaagtgaatttatatgcaataaacatgattaaataatttaaatgaaataaaaaagacggacaacttagtgggttgtccgtcttcattataagaatttatgcactatgtaggccggataaggcgtccccgccgcatccggcacaggcaccgtgctgatgtctgatgcgacgctggcgcgtcttatcagacctacaaaaccccccggcgaatgtacgcagccacattaatttcgccgttcgaatgccagcgctttgcgctcgatcagacgcatcatcagcgtcagcaggccgttaacgaccaggtaaataatccctgccgcaccgaacaccattacatcgtaggtgcgtccgtacaacaactggctgtatcccatcacttccatcagcgtaatggtgtatgccagagaggtacttttgaataccagcaccacttcgttggaataagaagagaggctgcgtttaaaggcatacggcagcaggatcgccagcgtatcttttttgctcattcccagggcgctacaggactgccactgaccttccgggatcgcacgaattgcaccgtaaaacagctgcgtggtatacgccgcactattcaggctcaacgcaatcagcgcacataaccacggttcactcaacaaatgccacagtgccggatactcctgcaaagtcggaaactggcccggcccgtaataaatcaggaagatctgcaccagcagcggcgtaccggtaaacagcgtgatataaccccgcaccagccacaccagcaccggcgttttcagcgtcaggatgatggtaaaaatcaatgccagaatcagtgccacaatcaggctggcaacggttagcgtcaggctggtgtgtagccctttcatcagttcgggtaaatactcaaacattagctgggcctccgctcaaaacgtgtcgcgcgcaggtcaatgcgtttgagaatgtactgactgagcagggtgatcaccaggtaaatcgccgccgccacaatgtaccaggtaaatggttcctgggtacgagtagcgatgctttttgtttgcagcattaaatcattcacactaatcaaactgaccagcgcggtatctttcagcagcaccagccactggttaccgaggccaggcagcgcatgacgccacatctgcggcatcaccagacggaaaaagatagcgcttttgctcagccccagcgcctgaccagactcccactgacccaccggcaccgctttcaacgcgccccgaagcgtttggctggcataggcggcatacagcagactcagagcgatgacaccacaaaggaacgggctaacgtcgaagttctcaatgtccatctgcactgggatctgcacgaacccaagattgatagtgaagccatcgctaagcgtcagcagcagctggctggagccaaaatagataaacagcaccaccagaatttctggcaggccacgcagaatggttaccagcgcactacctgcccacgcgacaggacgccattttgcgctctcccataccgcaaagaacatcgccagcgccagcccgacaatcaatgcacaaacggcaaggccgacggtcatcccggcggcgcttgctaaaggaaaaaattcattcatcaggaattacttctggaaccatttgttgtagatggtttcgtaagtgccatctttcttcactttttccagcgcagtgttgagtttctgctgcagctcagtgttgccctgacgtaccgcgatgccgaggccagtgccgaagtaatctttatcggtcactttgtcgcccaccgccgccagtttcgggttatctttcagccactcagtgaccactgcggtgtcaccgaagacgccgtcgatacgcccgttttgcagatccagttttgcgttctggtagctgtcatacggaacggtagtgatttccgggtgcttatccataatgaatttctggtgtgtcgtcccgttctgtacgccgacttttttgcctttcagctgatcaacactggtgtatttgccttgctgacccacaaacagggcagagttgtcatagtacggggtggtaaacagcacctgcttttcacgctccggagtgatatccatgcccgccatcacggcttctacgcgacggaatttcaggcttgggatcaggctgtcaaacgcctggttagagaaagtgcaggttgcatcaatctctttacacagcgcttgtgccaggtcgacgtcaaaaccaacgatctggttgtttgcatcaatgctttcaaacggaggataggaggcttcggtagcaaaacgaatggtttcggcagctgtggcggaaagactaaaacctgcaattaacgcggcaatcagaacttttttcattgttgttatcccgaatcttagtgagagagatagtttttaaatgcttcggtttgcggctcggtaaagcagctcgcgtcgccttgttctacgatatgaccattttccatatacaccactcggctggcggttttacgcgccacttcaacttcgtgggtgacgatcacctgggtaatattcgtttctgccagctcacgaatgatgctgacgatttgtgccgtaatttccgggtccagtgcggcggtcggttcatcgaacagcagtacctgcggttccatcatcaacgcacgggcaatagcaacacgctgctgctgaccaccagaaagatgcagcgggtaacgatcgctataaggtttgagacgcagacgttccagcagtttttctgcacgggccagcgcctgatctttactcaaccccagtacacggcagggcgcttcaatcaggttttgctgcacggtcagatgcggccacaggttgtattgctgaaacaccatgccaacgttacgacgcaaatcgcgaatcgctttgtcagagggtgttttggtgaaatcgaaatggttgcctgcaatgttgagcgtaccggagcgcggcatctcaagcagattgagtacacgcagcaggctgcttttacccgcgccgctggggccaagtaacaccagcgtttcgccctgtgggcaatccagcgtgatatcgaacagcgcctgatgcgcgccgtagaagcaattaatgccgtttaattgaatactcattgacactcgtatactggcagtctgatagctattgaggtcgaagatagtacctttgacagaataattatgcaatatttctgctttaaaagttaaaagcaaagcgcattattcaataaacatagcacaaaataacgggggcggtggtcggcgagcataaatgtcggcattcctcacgaaatgccggacaatttacggggtttattggttgatcaaggcgttagcgattctcgatggactgacggagcgtacccgccgtggcatgaacgctaccgcctaagtaacgcacatcgtcgatgacccaacactggccttcctgaatcattaacacttcatcctgccaaccctggtcaccctgtttgagatccacgcgcaatggaatgttacgggcatcacgattagggatagtgcttgcactggcaacgtgggcgctatctggcaaggtggttcgactggagaatggatcgttggtcagtagttcccgatggttattatcccgggaggcatcgctaagcagtgtcgccagtttgtcgctcagataagggcgcaaggcggtgatgtcgttgctgcggtgcaaaatgcggtagtcataaaattgctgggccacgttatccgggcctccttcaacgcaaggaccactgcgtgtgccgttatctttataagctggagtgactgtggtgcaggcactgaggagcagtgcgcaggggataagcattgtcaatttgctgtagcgcataatgatttccttataagcgatcgctctgaaagcgttctacgataataatgatatcctttcaataatagcgtatcagtctgataatgcttttgagatcgaaggcttagcaaacaaggagatcgatcatgcaattttctacaaccccaactctggaaggccagaccatcgttgaatattgcggtgtggtgaccggcgaagcgattttaggtgccaatattttccgtgatttctttgccggtatccgcgatatcgttggcggacgttccggtgcgtatgaaaaagaactgcgtaaagcacgggagatcgcctttgaggaattaggctcccaggcgcgggcgctgggggccgatgccgtcgtcggtattgatatcgactacgaaacggtcgggcaaaacggcagtatgctgatggttagcgtcagcggtacggcggtgaaaacgcgtcgatgagaagattcttctggctggtcgctgccgctctgttattggcagggtgtgcaggcgaaaaaggcattgtcgagaaagagggatatcagcttgatacccgacgccaggcgcaggcggcgtatccgcgcattaaagtgctggtgatccactacaccgcagatgattttgatagcagcctggcgacactgaccgataagcaggtcagcagccattatctggtccctgcggtaccaccgcgatacaacggtaaaccgcgcatctggcaactggtgccggaacaagaactggcctggcatgcggggattagcgcctggcgcggggcaacgcgccttaacgacacctctattggcattgagctggaaaaccgtggctggcaaaaaagcgccggagtgaaatattttgccccgtttgaaccggcacagattcaggcgcttattccactggcgaaagatattattgcccgttatcacatcaagccggaaaacgtagtggcacatgcggatatcgcaccgcagcgcaaagacgatccggggccattatttccctggcagcaactggcgcagcaggggattggtgcctggccggatgcgcagcgggttaacttttaccttgccgggcgcgcgccgcacacaccggtagataccgcgagtttgctggagcttttggcgcgctacggttatgacgttaaacctgatatgacaccgcgcgagcagcggcgcgtgattatggcattccagatgcatttccgcccgacgttatataacggcgaagcggatgcagaaactcaggcgattgccgaagcattgctggagaaatacgggcaggattaacgcggcagttttccgtggtcgcgtagccaggcggcagttttctcgataccttcatccagggtgatgaccggctgataacctaactcttcctgcgcacgcgtaatatccagcgtaaagtcaaaattcaacttggagacgccgtagtgggtcagcggcggctcttttgcactcttgcggcctaaacgctccatgctgcgggcgatcatatccagcatcgggtaggggacggaacgaatacgacagtcaatattcaactcgtcgatcagcttctgcacgatgctgcgcagtgtgcgatgctcgccgttggtgatgttgtacacacgcccggaaggtagcttatcgcaggcttcctggcttgccagccacattgcgtgcacggcattttcatagtaggtcatatcgaccagcgcactgccgccatgcggtaacagaatactgccgtagtggtgcatcatatgcgccagacggggaataaagactttatcgtgcggtccgaacagactttgtgggcgcagaatagtaaagcgcgtttgtggattcgcctggctaagcatattgatcacttcttcgctggctgctttgctgcgggcaaactcgttggcgaagcggtgagggcgaaaatcttctttaatatcgcgatggtggtgataatcgaagtacagggagggggaagagatatgaataaagttacgcacaccccaggcgacagcccattcacccaggcggcgagtggcgcgaacgttagccagatcgaaagcctgttgtgtcccccagggactggtaaagctggagcagtgccacagcgtatcaatgcccgcgagcatcactttagcttgactactaaccagctcggtcagatccgccggaacaaactctgcgcccattttttccagcaatttgcccattgcctcgttgcgaccggtcgctcgcacgctgatgcctttctggcataaaaactctaccgcgtttcgacctaagccgctggtggcgccggtaaccagtaccttcatatcaatccactgttgttgagaaaataacgtgcgcattcttccgtgatttcccccatgatgcaatgggaaacatgaaagaataacgcaggttttgtcgattaatctgtgctttgttctgccagtctggcgatttgttttgccattccgcgaaaaataaacagatgcgcggggatcatcaataaccagtaaaacagccccggcataccgtgcggatgccagaaagcgcggacatcgatagtacgatagtcgcctttatcttccaggctaaaacacagtcgtcccagccccggcgctttcatgccaaataacaacgtaagttgtttttccggttcaacgacaatcactttccagctatccaccgcatcgccagtctgtaaatattcgcgctccgggcggcctttcgccagcttatgaccgatcgcgcggtccatcaacgcccgtgtctgccacaaaatattgccaaagaaataacgctctttaccgccgatttggttcactacctgccataaagcagcaaggctggcggacgttttaacggtaaaccccgcctgtttggcaaaataaccgtactccggtcgccagcgggcaaaggcctgagcgtcgtagccccagtcgctggagttgaccagtttttcctcctctttcaacgtgctacgtaccgcgtcatcgaaagcgatcagccgttgtgggatgagtgcacgtagcgcggtatcatccgccagcagatcgtgtttcagcccctgaatcaacgccctggcggtggtgggcggtacggaagtaatcacattgagaaaccacacgctaatccagcgggtggggagggggatggggatcaaccagcggcgcttaccgctcaccgccataaaatgttcaaactgttgctgataactgagcacctctggtccggcggcttcgaagatgcggtgttcgctggccggatgatctaacaacgcaaccagatagtgcagcaagttttccagcgcaatgggcgtggtgcgactacgaacccagcgcggaggcgttaagactggcaggttgtagaccatatcgcgcatgacttcgaacgccgcggaacctgcgccaacgataattccggcccgcagttcggtcacgggtacattcgcttcacgcagaatgtccgccgtagcctgacgagcacgcagatgatcgctctgctcatgtggcggggcctgcaagctactaagaaagattaattgcttaactggtacttcacgtagcgcatcgcggacgttgagagccacctggcgctcctgagcgataaaatcgccgccttcgcccatgctgtgcaccagaaaatagaccgtatcgatatcctgcaacagggccggtaggttatccggccagctgagatcgactttatggcaactgacgtttgccagttgcagctttgcaagcctgtcgacatgacgtgccgccgccaggatctgatgcccttgctggctgagtgtgcgcaccagatgctgaccaatgtagccactggcaccgagaactaaaatgcgttgcggcacgtctctctccttaacgcgccaggaatgcacgccagtgggcggcgacttccgccagttgttcgcggctgacgtcaagatgcgtcaccaggcggacaatcgggctggcgttaatcagcacgtttctcgctttcatgtattcgcctaacgcggcagcattttcttccccgacgcgaacaaacagcatattggtgtcctgacgcatcacatccgcgcctgcttcacgcagctgctccgccatccaggcagcgttgtcgtggtcttcctgcaagcgcgcaacgttatttttcagggcatatatcccggcggcagccagaatgccggactggcgcatcccgccacctgtcattttccgccagcgaatggcacgtttaatgtaatcacgattaccgacgagtaaactaccgactggcgtcccaagacctttgctcaggcaaatggtgaagctatcacaatattgcgtgatctctttcagttcgcagccgtaagccaccacggcattaaagatgcgcgcaccgtcaacatgcagcgccagattgcgctcgcgggtaaattcccatgcttctttcaggtattcccgcggcaacactttgccgttgtgggtgttttccagactgagtaatttggtgcgggcgaaatggatatcgtcgggtttgattttcatcgccactttatccagcggtagcgtgccgtcggcagccgcgtctatgggttgcggttgaatactgcccagcaccgccgcgccaccggcttcaaacagatagttatgcgcggcctgaccgacaatatactcttcgccgcgttcgcagtgactgagcagagcgaccaggttggcctgagtgccggtaggcagaaaaatggcggcttctttaccggaaagctctgctgcgtagtcctgcagagcattaacggtagggtcgtctccgtaaacgtcgtccccaaccggggcggccatcatcgcttcgagcatggcgcggcttggtcgggtaacggtatcactgcgtaaatcaatcatggcatgtccttattatgacgggaaatgccaccctttttaccttagccagtttgttttcgccagttcgatcacttcatcaccgcgtccgctgatgattgcgcgcagcatatacaggctgaaacctttggcctgttcgagtttgatctgcggtggaatggctaactcttctttggcgaccaccacatccaccaacaccggaccgtcgatggagaaggcgcgttgcagggcttcatcaacttcagacgctttttctacacggatacccgtaatgccgcacgcttcggcaatgcgggcaaagtttgtgtcgtgtagttcggtgccgtcagtcaaatagccaccagctttcatctccatcgccacaaagcccagcacgctgttgttaaagacgacaattttcactggcagtttcatctgcactacactgaggaaatcgcccatcaacatgctaaaaccgccatcgccgcacatggcgaccacctgacgttctggctctgtcgcctgcgcacccagcgcctgcggcatggcgttagccatgctaccgtggttaaagctacctaacaggcgacgcttgccgttcatttttagataacgtgccgcccacaccgttggcgtaccaacgtcacaggtgaaaatagcgtcatcggcggcaaaatgactaatttgctgcgccagatattgcgggtgaatggctttctcgctcggtttagctaaatcgtccagccctttgcgggcgtcgcggtaatcttccagcgctttatccagaaacttgcgatcggctttttcttccaccaatggaagcaatgcacgcagagtgctcttgatatcgccgaccagtgccatatccaccttgctgtgagcgccgatgctggctgggttgatatcaatctgaatgattttggcatcggtcgggtagaaggcgcggtagggaaattgcgtgccgagtagcactaacgtgtcggcgttcatcatggtatggaaaccactgctgaagccgattaacccggtcattccaacatcatacggattatcgtattcgacatgttctttaccgcgcagggcatgaacaataggcgctttaattttcccggcaaactcaactaactctttatgcgcccccgcgcagccgctgccacacatcagggcgatattgctggaataacgcagcagttgcgccagtttgcgtaactcttcttcttccggcgtcacgactggttgtggcgcatgataccagtgcatggttgccccttctggcgcaggttttaacgccacgtcgcctggtaacacgacaacgctaacgccacggttaagcaccgctttgcgcatggcaatcgccagtacttgtgggatctgctccgggctggaaaccagctcgcaatagtgactacattcgcggaatagctcttgtgggtgggtttcctggaaatagccgctgccaatttcgctggagggaatatgagcggcaatcgccagtaccggaacgtgattgcggtggcaatcgaacaggccgttgattaagtgcaggttgccggggccgcagcttccggcgcagaccgccagttctccgctaagttgtgcttcagcgccagcggcaaaggccgccacttcttcgtggcgggtggacatccactcgatggtgcccatgcgattaagactgtcactaagaccgttcagagagtcgcctgtgactccccagatgcgtttcacccctgcgctttcgagtgttttggcgatataagctgcaaccgtttgtttcatggttctccatctcctgaatgtgataacggtaacaagtttagttcatctgacggagggggaagggatgggagagaaaggaggcactaacggttaaatagcccgatgaaaggaatatcatcgggcataaggcgattatgcgagaaccaaatccccctgcggatggcaggagcaggccagtacgtaaccttcagcgatttcggcgtcggtcagcgtcattgtgctgctcaccgtatattcaccggaaaccacttttgtcttacagcagccgcaaacacccgcacggcaggcagcgacaaccggaacgttattgctttccagcgcctccagtagcgtggtgccaaccggggcgtaaaattctcgtgccggttgcagtttggtgaatttcagaccgctggtcgccgcttctgctactggggtgaagaatttctctttaaagaaacgcgtcacgccgagcgctttcacttcctgctctacccaatccatatacggagccgggccgcaggtcatcacggtacgactagctaagtcaggtacacctgccagcagttcgcgagtgagacgaccagcgataaagccttcggtaacgttattttctgccaccagcgttaccggatagttacgccactcatcggcgaaaataacatcctgcggcgtacgcacgttgtagatcacccgcacatcggcctgtggacggttcttcgcaagccagcgacgcatgctcataatcggcgtgacgccgcagcctgccgccagcaacaggaatttatcttctgctttatcgtcgcaggtaaattcccccatcgcgtcgctaagccagagataatcaccgcgttttacatcgcgcgtcagccactgggagccgacaccgtcatcaatccgccgcacggtcagggtgatatattcactcacgcctggcgtggaggaaatggtgtaagcacgcagcgtttccgcactgtttcgcacgctgaccagtgcatattgcccggcgcgatatgggtagtaatcgtggcaaatcagggaaatcgtccacacatccggcgtttcttgcgtaatgtgatgaacctgcatccgccacgggcattgattcgttggcatcgtcatcgacaaactccttacgcgctcaacagttgcttcatgtcttcttcaacagtggtgatagaacgcaggccgaatttctcgttcagcaccgccagcaggtctggtgtcaggaaaccaggtgcagtcgggccggtgacgatatttttcacgcccagagaaagcagcgtcagcagaatgacgatcgctttctgttcaaaccaggagagcaccaggctcagcggcagatcgttgacaccgcagcccagtttctctgccagagtgacagccagaataatcgcactgtaagcatcgttacattgacctgcatctaccagacgcggcagaccttcgatatcgccaaactcaagtttgttaaagcgatatttaccacaggcgagggtcaggatcaggcagtcatccggcacgctggtggcgaaatcggtgaagtagtggcgctcgccgcgtgcgccgtcacagccaccaagcaggaagatatgacgcagtttttcacggctcaccagatcaatcagcgtatcagcagcgccaagcagcgtctggcgaccaaaacccacggtgataaggtgcggaatttcgctgtacgggaagcctgccatctgttgcgcctgggtgataaccgcagagaaatcatcaccgtccagatgacgcacgccaggccagccaacaatgctgcgggtccagatacgatcgtcataagcgcctacggttgggtcgatgatgcagttgctggtcatcacgatggggccagggaaacgagcgaactccacttgctgattctgccagccgctgccgtagttaccgaccagatgcttgaatttacgcagctccgggtagccatgcgcaggcagcatttcgccgtgggtgtagacattaacgcccgtgccttcggtctgttccagcaggttgtagagatctttgagatcgtgaccggaaatcagaatgcatttacccgccgtcgctttgacgttgacctgggttggcgtcgggtgaccgtatttaccggtttcgcctgcatccagaatgctcatcactttgaagttcatctggccgatttccatactacactcaagaagcgcgttcatatcggcaggccaggtccccagccacgccatgattttatggtactgggcataaatatcgttgtcgtattgaccgagaacatgcgcgtgttccatataggccgccgcacctttcaggccatacaggcacagcagacgcaggccgagaatgttttcgccaatcgccgctttatctttgttaggggtaaattctgctgcctgacgttgcagctcgccgagatcgtcgctcaccagttgcaggtcagccatcgggttatcgacgcgcgcgttggcatctacagccaggcattgcgctttcagcgcctcgcgcagggcaatcgcttcacgagcgtagccgacaatacgcggagaatcgaagttaacgttggtcagggtactgaaaaaggcacgtggcgcgaagctgtcaacatcgtggttgatgatgccgtattcacgcgcttttaccgcccaggcagaaagcccttgcagcgccgcgatgagtaaatcctgaaggtcagaagtttccgccgttttaccacacatcccctgcgcgtaactgcagccgtttcctgccggagtacggatagtttgttcacattgcacacaaaacatgatcacaccttttaaagttatatttaatatacatgtttaaggttaagacgcttaacgcggggataaaagggatttttcatgcaactttaagggagattgatttagcgcaattttggcggcagggatctaccgccagagaggtattacgcagagaaaaaggcgatgaggatcggcactaacaggctaagaataaaaccgtgaacaattgccgccgggaccatatccagcccgccagtacgttgaagaacgggcagggtgaaatccatacttgtggcaccgcataagcccagtgcagtagagcggctgcggcgaatcagcccagggatcaacataatagcaatcagttcacgggccagatcattaaaaaacgccgcgctcccgattaccggaccaaaagattcggtcaataaaataccggaaagagaataccagccgaaaccggaggccattgccagcgcggtattgatggggagatcaagaataaaggcgttaattaaaccaccaattaaactactgacaaccaccaccacggcgacaatcattccccggcgattaaggacaatctgctttaaggtcatgccattattgcgcaactgaataccaacgaggaaaagtagcaaaattaacgtgtattcactggcttcggtcgcgtgttgtaagaaagccagtccacttagaccaatggcaaaaccaatcactactacgccgcacagttttaggctctccagcgccatcgcaatacggctcgggagtttttcttgctgatggtggttgcgccacggcaggcctcgctccagccacatcagggcggcaatattacacagtaaaataacggtaatactgacggcagaataatgcagaatcgccaacaggttactggcgaggttatcgagaaacgccagactgatacccataaaaaagagaataaggtaaaccatccagcttaatagctgattaataacttttaacgcagcttgttggcgaagcggaatgaggtaacccacaatcaggggaaccagaatgattaacagcccagaaaacatgaaaacccagtccttgcaaagatgaagtcgaaatgcgcgatgacacactactgaaagcggaaggacgagtaaagttgcaattaaaaggaaatgttatgcataaggagcagtagagtattcgttttcatttaaagatattcttgcgctttaattacaaactgcaccgatgttggtggcgtcaaaatcgccgaggcgttccctgaaggccggggcagcccacatggatgtgggctgagggcgcgttttacagggatgttacctcgcgcccgacccggtagccgtaagggataagtcgagggcaccgcgcagcggcgattttgttcgccagagcccgggggtgcagggggcggcggcgattggccgccccctgcgcgctccttgcgccagtggcaatatgttgcttagctcatgaaaggagcgcaacaagatgatgaatcaacatataacaacatcttaaaaaaaggcctgacattacgccaggccttctgcgttaattaatcacgcttttccagcagggtccggtaaatcagaccaccgataatgccgccgacaattggcaccacccagaagaaccacagttgttctaatgcccagccgccctggaagatagcaaccgcggtgctgcgcgccgggttaacagaagtgttagtcaccggaatactaattaagtgaatcagggttaaggccagaccaatagcgatcggcgcaaaacctgccggcgcgaatttgtcggttgcgccgtggatcaccaacaggaaacctgcactcaataccagttcaactaccagcgcggaaagcatggaataaccgcctggactatgctcgccataaccgttagaagcaaaaccgctggctgccgcgtcaaaacccgttttaccactggcaattaaatacagcagcgccgctgcaacaataccgccgacaacctgggcaattacgtagccaacgacttcttttgccggaaaacgtccgccagcccataaaccaatagtgaccgccgggttaaaatgaccaccagaaatatgaccaacagcaaaggccatcgtcagaacggtcagaccgaacgccaacgccacgccggcaaaaccaatgcctaattccgggaagcctgcggccagtacagcactaccacagccaccaaaaacaagccagaaagtaccaaaacattcagctgctaattttctgaacatatccaccacaattaaaaattgaccctgtgaaaaatatggtcgttttatagggtcgtcgtaaaaaagtgacgacggaaataatgcgcggctattttaaaaacgaaggcgagtcattcaccagataaataaatccagtaaatttgatttagggcaacagcgggttgccccatatagtcatttgtctgattgacagtgtagtgcacgcaaaagatttaatcctttaggcgtaataaaaaataatttatcatgctaattatttgattttgttgtttttgcagacttatcagcaagagggagtataacgcgattattcgctcatttttcagacatttgccatgcttaaatgtgatgtcatcacgtattagcaaggcctttcccgttatactgccagcgtaaaggataagtcacatatttctggaggggatatgattcttgagcgcgttgaaattgtgggttttcgcggtatcaaccgtttgagcttgatgctggaacaaaacaacgtcctgattggggagaacgcgtggggtaaatccagcttgctggacgccttaactctgctgctaagcccagaaagtgatctctaccattttgagcgcgacgatttctggttcccgccgggagatatcaacgggcgagaacatcatctgcatattattttgaccttccgcgaaagcctgccaggccgacatcgggttcgccgttatcggccgctggaagcgtgctggacgccatgcaccgatggctatcaccgtattttttatcgtctggaaggggagagtgcggaagacggcagcgtgatgacactgcgcagttttctcgataaagacggacatccgattgatgtcgaggatattaacgatcaggcacgccatctggtgcgtttaatgccggtgctgcgcttgcgtgatgcccgttttatgcgccgtattcgtaacggcacggtgccaaatgtccctaatgtggaagtcaccgcgcgccagctcgatttcctcgcccgtgagttatccagtcatccgcaaaatctctctgatgggcagattcgtcagggactttccgcaatggtacagctgcttgagcattatttctctgagcagggggccggacaggcgcgatatcgtttaatgcggcggcgagccagcaatgagcaacgaagctggcgctatctggatatcatcaaccggatgattgaccgacctggtgggcgcagctatcgggttattttgctcggcctatttgctactttgttgcaggcaaaaggcacattgcgactggataaagacgcccgtccattgttgctgatcgaagatccagaaacccgtttacaccccattatgcttagtgttgcctggcatctgttgaatcttctgccattgcagcgcattgccaccaccaacagcggtgagttgcttagcttaacgccggtagagcatgtttgccgactggtacgtgagtccagccgcgttgccgcctggcgtctggggccgagtggcttgagtaccgaagatagccgacgcatatcctttcacattcgttttaaccgtccgagtagcctgtttgcacgctgctggttgctggtggaaggggaaacggaaacctgggttatcaatgaactggcgcgtcagtgcggacatcattttgatgccgaagggatcaaggtcattgagtttgcccagtccgggctaaagccactggttaaatttgcccgccgaatggggattgaatggcatgtactggtcgatggcgatgaagcagggaagaaatatgccgctacggtacgcagcctgttgaataacgatcgggaagccgaacgagaacatttaacggcgttaccggcgctggatatggaacattttatgtatcgccagggattttccgatgtgttccaccgcatggcgcaaatcccggaaaatgtaccgatgaatctacgcaaaattatcagcaaagcgatccatcgctcttccaaacccgatcttgccattgaagtggcaatggaggcaggacgtcgtggtgtggactccgtaccgacgctgctgaaaaaaatgttcagtcgcgtgctgtggctggcgcgcggtcgcgcggattaaccgcgaaacatcgtggccatttgtggctgaatagcgtcgagcatctcatagcgccgacggtattcagcccgttttttactggcgatttcggcaatctcttttcgtgctatctgtgctggaaggcggtaatggcgttcagcatcacatacgccgccaacgctttcccagaaagcgttgtaatcagcgtggatcttgccttctttatcgcgataacgcaggctgcggtaaatatgcgtttcattgctgacggcaataatctgctctacctgcaaacgttgggcaaacagacaggccgcttccatcacgaggcgtttgggaaatagcccgtggcaggctttcgtcgcattctggatttcctgatgtggaatttcccattttgcgccttgcagtccgccaataaacatcgttcttttcccctgatattcacacagggtaaacgtgatctctgccagaggaataccttcgctgttgcggaacaggattgtgctgtcaccttctttatccatactgatcatcatggtcagctcaagcgtgaactgctcgccgtttttgccttccagcttcgccagttgcagcccgggggtattcaaatataagctgaattcttccgcgctcatacattcgcggagtaacgcataatggtaacgtaacgcctccagcaattgcttacggctaagattcgccgcaaggtaagggcgatgcagacgcacaggcagtcgcggctggcgcgttaacaatacattgagattaggccagtgggaaagttcgttcatccactcaacgcttaaacgcggcataatcaagctgcgcagcaaaaatttctggcgaaaactacggcgatgccagaatttacccggccgacactgtccacgtgccagactaagaaaaagactcaggctgctgagagattcagatggcgtaaaggtccgttcagttagctggctcatattcatgaaatcaatggttatacatggcgtgcttttcaccattgcgtatcttaaccaaacatcaatagtgtgattactaacgtaaattttagggttttgttgatatttcgttgaagttaatgacccggattggcatatggagtattcagaaaatttatgaaaaagcggaaaaccgtgaagaagcgttacgttattgcgctggtgatagtcatcgccggactgattacgttatggagaattcttaacgcacccgtgccgacttatcagacgctgattgtgcgccccggtgatttacagcaaagcgtgctggcgaccggaaagctggacgcgctgcgtaaggttgatgtgggcgcgcaggtcagcggtcagttgaaaactctgagcgtggcgattggcgataaagtaaaaaaagaccagcttttaggggttattgatcctgaacaggctgaaaaccagattaaggaggtcgaagcaacgctgatggagctacgtgcgcagcggcagcaggcggaagcggagctgaaactggcgcgggtgacgtattcccgtcagcaacgtctggcacaaacgaaggctgttagtcagcaggatctcgacaccgccgcgacggagatggctgtgaaacaggcgcaaattggcaccattgacgcgcaaatcaagcgcaatcaggcttctctcgatacggctaaaaccaatctcgattacactcgcatcgttgccccgatggccggggaagtcacgcaaatcaccactctgcaaggccagacggtgattgccgcacaacaagcaccgaacattctgacgctggcagatatgagcgccatgctggtaaaagcgcaggtttctgaagcggatgtaatccacctgaagccggggcaaaaagcctggtttacggtgcttggcgatccactgacgcgctacgaggggcaaatcaaggatgtactaccgacgccggaaaaggttaacgacgctattttctattacgcccgttttgaagtccccaaccccaatggtttgctgcggctggatatgactgcgcaagtgcatattcagctcaccgatgtgaaaaatgtgctgacgatccctctgagcgcgttaggcgatccggttggcgataatcgttataaagtcaaattgttgcgtaatggtgaaacacgcgagcgtgaagtgacgattggcgcacgtaacgataccgatgttgagattgtcaaagggcttgaagcgggcgatgaagtggtgattggtgaggccaaaccaggagctgcacaatgacgcctttgctcgaattaaaggatattcgtcgcagctatcctgccggtgatgagcaggttgaggtgctgaagggcatcagcctcgatatttatgcgggtgagatggtcgcgattgttggcgctagcggttccggtaaaagcaccctgatgaatattctcggctgtctggataaggccaccagcggcacctatcgcgtcgccggtcaggatgttgccacgctggacgccgatgcgctggcgcaactgcgccgcgagcatttcggctttattttccagcgttaccatttgcttagccatttaaccgccgagcagaacgttgaagtacccgccgtctatgctggtcttgagcggaaacagcgactgcttcgtgcccaggagttgctgcaacggctggggctggaagaccgtacagagtattatccggcacagcttagcggtggtcagcaacagcgcgtcagcatcgcgcgggcattgatgaacggtggtcaggtaattcttgccgatgaaccaaccggcgcactggacagccattctggcgaagaggtgatggcgatcctgcatcagctgcgcgatcgtgggcatacggtgattatcgtcacccacgatccgcaggtcgctgctcaggccgagcgggtgatcgaaattcgcgacggcgaaattgtgcgcaatcctcccgccattgaaaaagtgaatgttactggcgggacggaacctgttgtcaacacggtgtctggctggcggcagtttgtcagcggttttaacgaggcgctgacgatggcatggcgggcgctggcagcgaataaaatgcgtactttactgaccatgctggggattattatcggtattgcgagcgtggtttccattgtcgtggtgggtgacgccgccaaacaaatggtgctggcggatattcgttctattggtacgaatactattgatgtctatcccgggaaagattttggcgatgacgatccgcaatatcagcaggcgctgaagtacgacgacttaatcgccatccaaaaacaaccgtgggtcgccagtgccacacctgccgtcagccaaaacctgcgcctgcgttataacaatgttgatgttgctgccagtgccaatggcgtgagcggcgattattttaatgtctatggcatgaccttcagtgaaggaaacacctttaatcaggagcagctgaacggtcgtgcgcaggtcgtggttctcgacagtaatactcgccgccagcttttcccccataaagcagatgtggttggcgaggtgattctggtcggcaatatgcccgccagagtcattggtgtggcggaagaaaaacagagcatgtttggtagcagtaaagtgctgcgtgtctggctaccttacagcacgatgtccgggcgagttatgggccagagctggcttaactccattactgtcagggtgaaagaaggatttgacagcgccgaggcggaacagcaactcacgcgtttacttagtctgcgccacggaaagaaggatttctttacctggaacatggacggcgtcttgaaaactgttgaaaagaccacacgtactttacaactgtttctgacgctggtggcggtgattagcctggtggtgggcggtattggtgtaatgaatattatgctggtgagtgtgaccgagcggacgcgggaaattggcattcgcatggctgtaggtgcgcgagcaagcgatgttttgcaacagttcctgatcgaagccgtactggtttgcctggtcggtggcgcgttgggaataacactgagtctgttaattgctttcaccttgcagcttttcttacccggctgggagattggttttagtccgttggcgctgctgctggcgtttctctgcagcacggtcaccgggattttatttggctggttacccgcacgaaatgcggcacgactggatccagtagatgctctggcacgagagtaatttttgagataaaaatgccagccgatcgggctggcattttgcctttaggatgtacacaatgagacagaagagttatgcgactgccgcttctacttcgacgggcacaataacactggcgtgattgccttttggcccctggtggacatcaaactgaacggattgtccagcttttagcgttctgtaaccatccatctgaatggtggaataatgagcgaaaatatcttcgccgccgccttcagggcagatgaaaccaaaccctttggcattgttgaaccacttaacagtacccttttccatgcttcgacatccttcgcaaatcttatacaagtaagatggaataaaccggggtcagagagggggctgttcaaaacctcgccaactctagaaatacaatttagagaattagggcgagccgtcaagcatttgacaggggacaaggggcaggtatgaatcaaaaatttgaagcagttaacgctattgacaggaatgtgacagatgtcgctgatgccaacgatagatgatagttatctatcatgtggagtagattggtcaggcaaataagctcttgtcagcggcagggcgttctgccgataaccgtaaccgaagatgataactgacaatgggtaaaacgaacgactggctggactttgatcaactggcggaagaaaaagttcgcgacgcgctaaaaccgccatctatgtataaagtgatattagtcaatgatgattacactccgatggagtttgttattgacgtgttacaaaaattcttttcttatgatgtagaacgtgcaacgcaattgatgctcgctgttcactaccaggggaaggccatttgcggagtctttaccgccgaggttgcagaaaccaaagtggcgatggtgaacaagtacgcgagggagaatgagcatccattgctgtgtacgctagaaaaagcctgaatgcaggcataaaaattgggggaggtgcctatgctcaatcaagaactggaactcagtttaaatatggctttcgccagagcgcgcgagcaccgtcatgagtttatgaccgtcgagcacttgttactggcgctgctcagtaacccatctgcccgggaggcgctggaagcgtgttctgtggatttggttgcgctccgtcaggaactggaagcctttattgaacaaaccacacccgttctgcctgccagtgaagaggagcgcgacacacagccgacgctgagttttcagcgtgtactgcaacgtgcggtcttccatgtccagtcctccggtcgcaatgaggttaccggtgcaaacgttctggtcgctatctttagcgaacaggagagccaggcggcatatctgttgcgtaaacatgaagtcagccgtctcgatgtggtgaactttatctctcatggcacgcgtaaagacgagccgacacagtcttctgatcctggcagccagccaaacagcgaagaacaagctggtggggaggaacgtatggagaatttcacgacgaacctgaatcagcttgcgcgcgtgggcggaatcgacccactgattggtcgtgagaaggagctggagcgtgctattcaggttctctgccgtcgccgtaaaaacaacccgctgctggtgggggaatctggtgtcggtaaaaccgcgattgcggaaggtcttgcctggcgaattgttcagggcgatgtgccggaagtgatggctgactgtacgatttactctctcgatatcggttctctgttagcgggcacaaaatatcgcggcgactttgaaaaacgttttaaagcgttgctcaagcagctggagcaggacactaacagcatcctgtttattgatgagatccacaccattatcggtgcgggtgcagcgtctggtggtcaggtcgatgcggctaacctaatcaaaccgttgctctccagcggtaaaattcgtgtaattggtagcacaacctatcaggagttcagcaacattttcgagaaagaccgtgctctggcgcgtcgcttccagaaaattgatattactgaaccgagcatcgaagaaactgttcaaatcatcaatggcctgaaaccgaagtatgaagcgcaccacgacgtgcgttataccgcaaaagcggtgcgtgcggcggtagagctggcggtgaaatacattaacgatcgtcatctgccggataaagccattgatgttatcgacgaagcgggcgctcgcgcacgcctgatgccggtaagcaaacgcaagaaaaccgttaatgtggcggatattgagtccgtggtggcccgtattgcacgcattccagagaagagtgtttctcagagtgatcgtgataccctgaaaaacctcggcgatcgcttgaaaatgctggtcttcggtcaggataaagccattgaggcgctgactgaagccattaagatggcgcgtgcaggtttaggtcacgaacataaaccggttggtagcttcctgtttgccggccctaccggggtcgggaaaacagaggtgacggtacagcttagcaaagctttgggcattgagcttctgcgctttgatatgtccgagtatatggaacgccataccgtcagccgtcttattggtgcgcctccgggatacgttggttttgatcagggcggtttgctgactgatgcggtcatcaagcatccacatgcggtgctgctgctggacgaaatcgagaaagcgcacccggacgtgttcaatattctgttgcaggtgatggataacggtacgctgaccgataacaacggacgcaaagcagacttccgtaacgtggtgctggtgatgaccaccaacgccggggtacgggaaactgagcgcaaatccattggtcttatccaccaggataacagcaccgatgcgatggaagagatcaagaagatctttacaccggaattccgtaaccgtctcgacaacattatctggtttgatcatctgagtaccgacgtgatccatcaggtggtggataaattcatcgtcgagttgcaggttcagctggatcagaaaggtgtttctctggaagtgagccaggaagcgcgtaactggctggccgagaaaggttacgaccgggcaatgggcgctcgtccgatggcgcgtgtcatccaggacaacctgaaaaaaccgctcgccaacgaactgctgtttggtagcctggtggacggcggtcaggtcaccgtcgcgctggataaagagaaaaatgagctgacttacggattccagagtgcacaaaagcacaaggcggaagcagcgcattaatctgattgttaggtaggttggtcaagtccgtaatctcgaaagaggttacggactttttgtttatggggtggaggaggttcagaccctttttttaatgatgatggtaagttgttgataattagtgctgcgggaaggtaaggataaaaaagggtgctgcaggagaatgggatggttttgctttattaacaacgggctaaacgtgtagtatttgagttcactgccgtacaggcagcttagaaattcacaggtaacatactccacccgcccaccatgttcactgccgtacagacagataaaatgcgaaaaaaaagctcgcactttcgtacgagctcttctttaaatatggcggtgagggggggattcgaacccccgatacgttgccgtatacacactttccaggcgtgctccttcagccactcggacacctcaccaaattgttttgctaccaaacctcatgggtggcaacggggcgctactatagggagttggagtaaaacggtcaagaagaattttaatgataattattgtttgctcatactgtaaacaagttgtgcagtatatctacatcgagacaagttacggacttatacttccaaagtacttcatacatatcacaaaataaaaaggccggttaaaccgaccttttactcgttctttctcttcgcccatcaggcggtaaaacaatcagcgactacggaagacaatgcggcctttgctcaggtcgtacggggtcagttcaacagtcactttgtcgcccgtcaggatgcggatgtagtttttgcgcattttaccggagatgtgtgcagtaaccacgtgaccgttttctaactctacgcggaacatggtattaggcaacgtttcaagaacggtaccttgcatttcaatattgtcttctttggccatctaatcctctggggtatcactaccgtaatttgaaccggcaagataatgccgaagttctgtaaataagtaaagatttgcgcgctaaatcgcaacaaacaggttcggcacattactccgaaaacacacggctaagccgcaccaaaagcgcaacgtataagggagcggtgagataaacgatgggcgttacctgacgcgaaaaattccttatcggcagcggggtaatgagcgtaaccaactctgcgaccgcaattataacactctggggagaaatgtgccgaaaacattcattcttgtggactaaacaagcatcgtggtacccagaaattattcggcaatcgtccgaggcgcatttgattgagataattaaggtaatcccggcggggaatttcgcaggcaccaaggcttgctgtgtgatcgttaaggacctggcagtcgataagcttaccgccatgaccgataaattcctcacagaataccagaagcgccgttttagacgcattttccatccggctgaacatggactcgccacaaaatagcgttccctgggccacgccgtacataccgccgacaagctcatcttcacgccagacttcaatggagtgggcatggccgagttcgtgaaggcgatggtaggcttcgaccacgccacgcgtgatccaggttccttcttcgcgatcgctggcacagccttcaatgacctgaccaaaagcgtaattcatcgtgacacgataggggctgcgtttatgaaatcgcttcatactacggctgatatgcagactttctggccatagcaccgcgcggggatcggggctccaccagaggatggggtcgcctggagaaaaccacggaaaaataccacgctggtaagccattaacaggcgcgcagggctaagatcgcccccaagtgccagcaggccgttaggctcacgtaatgcgccttccggggaagggaaggctatactatggcgagaaagctgaaccaggcgcatgaccgcaaaactccacgcaagtcggatcgttcaataatagcttacaaaccctgcttgaactggtaataacgcccctgtctggcaagcagttctgcgtgagtaccttgctcaataatttgcccgttgtccatcactattatttgttggaaacgagagagtccgcgaagtcgatgggtgaccattaacaccgttttctcacgcatcatttctgcaagcaattcaaggatctggctttcggttgtggcatctaagccttcggtaggttcatccagcaacaccagtggcgcatcatgtaacagcgcacgggcgatagccagacggcgcagttcaccaccggagagctggcgtccgccttcacctaaccaactgttgagacctgcatcctcgagcagcttttccaggccaacgcgacgcaagatctcgctcagagcctcatcactactgccagggctggcgagtaaaagattatcacgcagcgtggcgctaaacagatgcactcgctgaggaacaacgctgatggtctgtcgtagagccgcttcattcaggctggctatggggctatcgttaagcaaaatctcgccctgttgcgggtcccatgcgcgggtcagctgttgtaacagtgtacttttgccgcatccggttcgcccgagaatcgctatatgttccccggcgtttacctgaagagaaatccctttaagtgcctgttgagattgctccggataagtgaactgaacatcccgtaacgtcaggctaacgcgatcggcaacacgagtttgggtatcaggaaaggtgacctccggtttttgatccgttaagtcagagatacgtacggcagaggcaatgacttgccccagatgctgaaatgcacccgttactggtgccagtgcttcaaacgcggctaacgcgcagaagacaaacagggcaattaacgcgccgggttgagcattgccgccaacgccgccagacgccatccacagcatcaggatcaccgctaacgcgccaatgagcagcattatcgcttggctcaatgcggtcagttcagattgacggcgttgcgcttccagccattgaatttctgtattctctagttgcgtgcgataacgatcgctggcaccaaaaatggtcagctcagcttgcccttgcagccaggccgtcagttgttggcgatactgtccgcgaagatgagtcagattttgcccggtgctttttcccgcacgataaaacagcggtggcatcaggaaaagcgtcagtaacataatgccgcccagcgtaaaggcgagggtgaaatcaaggaaacttaacccgattgtcaccaccataatcaccacaaaagcgcccaccagcgggctgataacgcgcaggtaaagatgatcgagcgtatcaacatccgccaccacgcgattgagcaattcgccctgacgatagcgcgccagtccggcaggggagaggggcagcaatttgctgaaggtgtaaatgcgcagatgctgcaacacgcggaaagtcgcgtcgtgacttaccagacgttcaaaatagcgcccggcagtacgggtgattgctgcgccacgcacgcccgcagcgggtagcatatagttgaagctgtacagtccggcaacccccgcaaccgcactggcgctgaggaaccagccggaaagtgtcaacagaccgatactggcgagcagcgtcacaattgccagcacaataccaagacttaacatccatttatgacgtttatacagtgccagatagggtagcaaagcgcgcatttaaatctcctcctgacgatgggccagtaatgtggcgaatgggccaccagccacacttaattccgcgtaacgtccttgctcaataatccggccatcctgcataacccaaatgacatcccagtcagcaagatcttctaactggtgggtgaccattaacgttgtctggcgcagagaggcggcattcagcgcctccattacgcgctgttcactgtgagcatcaaggctggcagcgggttcatccaacagtaataggctacagggatttagtaacgcacgggccaccgccacgcgctgcgcctgccccacggaaaggcgggcagcctggtcgccaacaggcgtatcaacgccttgtgggaggagcggtagaaactcgctgacccaggcgttatccagcgctgcttgtaattcttgttcgctggcatcaggtcgcgccagtagtacgttatcccgcaatgttgctgccggtaattgtgggttttgcccaacccaggagagatgtttacgccaactttctggacttaaatcgcgtaattctatcccgttgattcgtaggcttccctgataactgagaaaaccagaaagcgcgttcagcagactgcttttaccactaccgctgcgaccaaccaacaccgcacgttggcctgctggcaaagtaaagttcagcggtccggccagcgttttaccttccgggctcgtgataaacagctcctcggcctcaatggtcaccggatcggtgcttgctaattccgcctcaccacgttgcggatgggcgagcggggtttccataaacgttttcagactgtcagctgcgccaacagcctgggctttagcatgataaaacgtaccgagatcgcgtaatggctggaaaaactctggcgcaaggatcagggccagaaaacccgcagccagcgtcacaccggtatcgtagtgaccaaaatccagctcgccgagataggaaaaaccaaagtagaccgccaccagagcaatactcaggctggtaaaaaattcgagaatgccggaggataaaaacgccagccgtagcacttccattgtccgttggcggaaatcttcgctagcagaacgaatactttcaatttcagcttcaccacgaccaaaaatacgcaatgtttccatgccgcgcaggcgatcgaggaaatgcccacttaagcgagcaagagcgagaaagttacgtcggttagcatcggcagcccccattccaaccagcgccataaacaacggaattaacggtgcagtgcccagcagaatgagcgccgcagcccagttagaggggaagattgccaccacaatcagcaacggcacgctcactgccagcgccatttgcggcagatagcgtgcatagtaatcatgcatatcgtcaatttgctcgagtaccagcgtcgcccagctccccgcaggtttaccctgaatccacgctggccctgcttgttgcagacggtcgagaacctgacggcggatggcaaagcggatatgctgcccggcgtgataacccacccgttcgcgtaaccagaccacccatgcgcgcagtacaaaggtcagaaccagtaacgtaaagggaagcagcagggcttcacggggaatattctccataatcatatgttgcagaattcgcgccatgaaccaggcctgggcaatgatcaatatgccgctcacaaagcccagcagacgagaaatattcagccaacgttgggagatgacgctttgctgttttaaccagcgggttaactctttttgacgagatttattcattgcacgcttagcaggtgagttatcagaattatttgcagagcaatgttacaacggggaaaaaataaaggcgacccatagtcgcatggtgtcgccttctttacttttgttactgatttgtaaaattattttgcgtcagctaaaccatcgaggtagcgttccgcatcaagtgctgccatgcagcctgtaccggcgctagtaatggcctggcgataaatgtgatccatcacgtcgcctgcggcaaagacgccaggaatgctggtctgggtggcattaccatgaataccgctctgtactttgatgtagccgttttccagttccagctgcccttcgaaaatcgcagtattcgggctgtgaccgatagcaacaaacagaccggcaacgtcgagactctcgatgttatcgctgttttgcgtatcgcgcagacgaacgccagtgacacccatttgatcgccggtcacttcttccagcgtacggttggtgtgcagaatgatgttgccgttctccactttatccatcaggcgcttaatgaggattttttccgcgcggaaaccgtcacggcggtgaatcagatgcacttcgctagcgatgttagacagatacagcgcctcttcaaccgcggtattgccgccgccgatgaccgcaactttctggttgcgatagaagaaaccgtcgcaggttgcacaagcagaaaccccacggcctttaaaggcttcttcagagggcaggccgagatagcgtgcagaagctccggtggcaataatcagcgcgtcgcaagtgtattcgccgttatcgccattcagacggaacggacggttttgcagatccaccttgttgatatgatcaaaaatgatctcagtttcaaacttggtggcatgttcgtgcatgcgctccattaataacggaccggtcagatcgtttggatcgccaggccagttttccacttccgtggtggtggtcagttggccgcctttttccatgccggtaatcagcacaggttgcaggttggcgcgcgccgcgtagacagcagcggtgtatcccgccgggccactacccaggataagcagtttactgtgtttggtcgtgcccatgagatccccatagttgttggcagacaatgggcaggattgtagggaatttacagacgtaaaaaaagagtatgacgattttgttaacaatttgtgcaatcggcagcatcgataagcaggtcaaattctcccgtcattatcacctctgctacttaaatttcccgctttataagccgattaaatgatgaataaacgcccctgttaatgaatatctggcatgttgtactaaaaatcgatgttttgctttgacaatcccctggtgttttgcgaaaacattcgaggaagaaaaaaaacagtattcttatatgcgcataaccatgcatgtaaataccatgtttaccgtgctagtgaaatctacgtatggcgtggacagacgccattcgtgatgtcgatagctgccacaaggcaacggtcttctcaccgtagacccaggcattgcgcgccgtgaatcttcatgatttcggtctatcgtgacgggtagcgactctgaacagtgatgtttcagggtcagacaggagtagggaaggaatacagagagacaataataatggtagatagcaagaagcgccctggcaaagatctcgaccgtatcgatcgtaacattcttaatgagttgcaaaaggatgggcgtatttctaacgtcgagctttctaaacgtgtgggactttccccaacgccgtgccttgagcgtgtgcgtcggctggaaagacaagggtttattcagggctatacggcgctgcttaacccccattatctggatgcaagtcttctggtattcgttgagattactctgaatcgtggcgcaccggatgtgtttgaacaattcaataccgctgtacaaaaacttgaagaaattcaggagtgtcatttagtatccggtgatttcgactacctgttgaaaacacgcgtgccggatatgagtgcctaccgtaagttgctgggggaaaccctgctgcgtctgcctggcgtcaatgacacacggacatacgttgttatggaagaagtcaagcagagtaatcgtctggttattaagacgcgctaacacggaacaggtgcaaaatcggcgtattttgattacactcctgttaatccatacagcaacagtactggggtaacctggtactgttgtccgttttagcatcgggcaggaaaagcctgtaacctggagagcctttcttgagccaggaatacattgaagacaaagaagtcacattgacaaagttaagtagcggccgccgccttctggaggcgttgctgatccttattgtcctgtttgccgtctggttgatggctgccttactaagctttaaccctagcgaccccagctggagccaaacggcctggcatgaacctatccataatttaggtgggatgcccggtgcgtggttggcagatacgctgttctttatttttggcgtgatggcttacaccattcccgtcattattgtcggcggttgttggtttgcctggcgtcatcagtccagcgacgaatacattgattattttgccgttagcctacgcatcattggcgttttggcgctcatccttacctcctgtggtctggcggcaatcaacgctgacgatatctggtattttgcctccggtggcgtcattggcagcttactaagcactacgctacaaccactgctacacagtagcgggggaactattgcgctgctctgcgtttgggcagcgggcctgacgttgttcaccggttggagttgggtgaccattgctgaaaaactcggcggctggattttaaacattctcaccttcgccagtaatcgtacccgtcgcgatgatacctgggtcgatgaagatgagtatgaagacgacgaagagtatgaagatgaaaatcacggcaaacagcatgaaagtcgccgtgcccgtattcttcgcggcgcgctagcgcgtcgtaaacggttggcggaaaaattcattaatccgatggggcggcaaacagacgctgcgttgttctccggtaagcggatggatgatgacgaagagattacctacactgcacgcggtgtggctgccgacccggacgacgtcctatttagcggcaatcgtgcaacgcagccagaatatgacgaatacgatccattattaaacggtgcgccaattaccgaacctgtcgctgtagcagctgctgctaccacggcgacacaaagctgggctgcgccggttgaacctgtgactcagacgccgcctgttgcctctgttgatgttccacctgcgcaacctacagtagcctggcagcctgtaccgggtccacaaacgggagagccggttattgctcctgcaccggaaggttacccacagcagagtcaatatgcgcagcctgcagtgcaatataatgagccgctgcaacaaccagtacagccgcagcagccgtattatgcacctgcagctgaacaacctgcgcaacagccgtattatgcccctgcgccagaacaaccggtggcaggtaacgcctggcaagccgaagagcagcaatccacttttgctccacagtctacataccagactgagcaaacttatcagcagccagccgctcaggagccgttgtaccaacagccgcaacccgttgaacagcagcctgttgtggagcctgaacccgttgtagaagagacaaaacccgcgcgtccgccgctttactactttgaagaagttgaagagaagcgagcccgtgaacgtgaacaacttgcggcctggtatcaaccgattccagaaccggttaaagaaccagaaccgatcaaatctagcctgaaagcaccttctgttgcagcagtacctccagtagaagccgctgccgctgtttccccgctggcatctggcgtgaaaaaagcgacactggcgacgggggctgccgcaaccgttgccgcgccagtcttcagtctggcaaatagcggtggaccgcgtcctcaggtcaaagaggggattggtccgcagttgccacgaccgaaacgtatccgcgtgccaactcgtcgtgaactggcgtcttacggtattaagctgcccagtcagcgtgcggcggaagaaaaagcccgtgaagcccagcgcaatcagtacgattctggcgatcagtacaacgatgatgaaatcgatgcgatgcagcaggatgaactggcacgtcagttcgcccagacacagcagcaacgctatggcgaacagtatcaacatgatgtgcccgtaaacgcagaagatgcagatgctgcggcagaggctgaactggctcgtcagtttgcgcaaactcaacaacaacgttattccggcgaacaaccggctggggcgaatccgttcagcctggatgattttgaatttagcccaatgaaagcgttgctggatgatggtccacacgaaccgttgtttacgccaattgttgaacctgtacagcagccgcaacaaccggttgcaccgcagcagcaatatcagcagccgcaacaaccagttccgccgcagccgcagtatcagcagccacaacagccggttgcgccgcagccacaatatcagcagccgcaacaaccggttgcgccacagcagcaatatcagcagccgcaacaaccggttgcgccgcagcagcagtatcagcagccacaacagccagttgcgccacaaccgcaggataccctgcttcatccgctgttgatgcgtaatggcgacagccgtccgttgcataaaccgacgacgccgctgccttctctggatttgctgacaccgccgccgagcgaagtggagccggtagatacctttgcgcttgaacaaatggctcgcctggtggaagcgcgtctggctgatttccgtattaaagccgatgtcgtcaattactctccggggccggttatcactcgctttgaattgaacctggcaccgggcgtaaaagcggcgcgcatttctaacttgagtcgggaccttgcccgtagtcttagcacggtggcggtgcgtgtcgttgaagttattcctggcaaaccctatgtaggtctggagttaccgaataaaaaacgacaaaccgtttatctgcgcgaagttttggataacgccaaattccgcgataatccgagcccattaaccgtggtgctgggtaaagatatcgccggtgagccggtggttgccgatctggcgaaaatgccgcacttgttggttgcggggactaccggttccggtaaatctgtcggtgtgaacgcgatgatcctgagcatgctttataaagcacagccagaagatgtgcgtttcatcatgatcgacccgaaaatgctggagcttagcgtttatgaaggcattccgcatctgttaacggaagtcgttactgatatgaaagatgccgccaacgcgctgcgctggtgtgttaacgagatggagcgtcggtataaactgatgtctgcgctgggtgtgcgtaatctggcgggttataacgaaaaaattgctgaagccgatcgcatgatgcgtccgattccagacccgtactggaagccgggtgacagtatggatgcccagcatccggtgctgaaaaaagaaccatacattgtggtgttggttgacgaatttgccgacctgatgatgacggtaggtaaaaaagtggaagagctgatagcacgtctggcgcaaaaagcccgtgccgcgggtatccacctcgtactggcaactcagcgtccaagcgttgatgttattactggtctgattaaagcgaatattccgacccgtatcgcctttaccgtatccagtaagattgacagtcgtaccattcttgatcaggctggcgcggaaagtctgctgggtatgggggatatgctctactctgggccgaactccacgttgccggtacgtgtccatggtgcttttgttcgcgatcaggaagttcatgccgtggtgcaggactggaaagcgcgtggtcgcccacagtatgttgatggcatcacctccgacagcgaaagcgaaggtggtgcgggtggtttcgatggcgctgaagaactggatccgttgttcgatcaggcggtgcagtttgtcactgaaaaacgcaaagcgagtatttctggcgtacagcgtcagttccgcattggttataaccgtgcagcgcgtattatcgaacagatggaagcgcaggggattgtcagcgaacaggggcacaacggtaatcgtgaagtgctggccccaccgccgtttgactaactaatgcatcgtatgccggataaggcgcggtagcgtcgcatccggcactctatcaactgaaaattcagtattttcttctttcctcaagctgattattagcctggaatagagagtagagggaactcccgatcgggagtgacgtaatttgaggaataatgatgaaaaaaattgccatcacctgtgcattactcagtagcttagtagcaagcagcgtttgggctgatgccgcaagcgatctgaaaagccgcctggataaagtcagcagcttccacgccagcttcacacaaaaagtgactgacggtagcggcgcggcggtgcaggaaggtcagggcgatctgtgggtgaaacgtccaaacttattcaactggcatatgacacaacctgatgaaagcattctggtttctgacggtaaaacactgtggttctataacccgttcgttgagcaagctacggcaacctggctgaaagatgccaccggtaatacgccgtttatgctgattgcccgcaaccagtccagcgactggcagcagtacaatatcaaacagaatggcgatgactttgtcctgacgccgaaagccagcaatggcaatctgaagcagttcaccattaacgtgggacgtgatggcacaatccatcagtttagcgcggtggagcaggacgatcagcgcagcagttatcaactgaaatcccagcaaaatggggctgtggatgcagcgaaatttaccttcaccccgccgcaaggcgtcacggtagatgatcaacgtaagtaaaggcacctgagtgagcaatctgagcctcgattttagcgataatacttttcaacctctggccgcgcgtatgcggccagaaaatttagcacagtatatcggccagcaacatttgctggctgcggggaagccgttgccgcgcgctatcgaagccgggcatttacattctatgatcctctgggggccgccgggtaccggcaaaacaactctcgctgaagtgattgcccgctatgcgaacgctgatgtggaacgtatttctgccgtcacctctggcgtgaaagagattcgcgaggcgatcgagcgcgcccggcaaaaccgcaatgcaggtcgccgcactattctttttgttgacgaagttcaccgtttcaacaaaagccagcaggatgcatttctgccacatattgaagacggcaccatcacttttattggcgcaaccactgaaaacccgagctttgagcttaatagcgcactgctttcccgtgcccgtgtctatctgttgaaatccctgagtacagaggatattgagcaagtactaactcaggcgatggaagacaaaacccgtggctatggtggtcaggatattgttctgccagatgaaacacgacgcgccattgctgaactggtgaatggcgacgcgcgccgggcgttaaatacgctggaaatgatggcggatatggccgaagtcgatgatagcggtaagcgggtcctgaagcctgaattactgaccgaaatcgccggtgaacgtagcgcccgctttgataacaaaggcgatcgcttttacgatctgatttccgcactgcataagagcgtacgtggtagcgcacccgatgcggcgctgtactggtatgcgcgaattattaccgctggtggcgatccgttatatgtcgcgcgtcgctgtctggcgattgcgtctgaagacgtcggtaatgccgatccacgggcgatgcaggtggcaattgcggcctgggattgctttactcgcgttggcccggcggaaggtgaacgcgccattgctcaggcgattgtttacctggcctgcgcgccaaaaagcaacgctgtctacactgcgtttaaagccgcgctggccgatgctcgcgaacgcccggattatgacgtgccggttcatttgcgtaatgcgccgacgaaattaatgaaggaaatgggctacgggcaggaatatcgttacgctcatgatgaagcaaacgcttatgctgccggtgaggtttacttcccgccggaaatagcacaaacacgctattatttcccgacaaacaggggccttgaaggcaagattggcgaaaagctcgcctggctggctgaacaggatcaaaatagccccataaaacgctaccgttaatgttatcgttgcggtaatgttgttactgtatccctgtggtcgcaggctgtggccacatctcccatttaattcgataagcacaggataagcatgctcgatcccaatctgctgcgtaatgagccagacgcagtcgctgaaaaactggcacgccggggctttaagctggatgtagataagctgggcgctcttgaagagcgtcgtaaagtattgcaggtcaaaacggaaaacctgcaagcggagcgtaactcccgaagcaaatccattggccaggcgaaagcgcgcggggaagatatcgagcctttacgtctggaagtgaacaaactgggcgaagagctggatgcagcaaaagccgagctggatgctttacaggctgaaattcgcgatatcgcgctgaccatccctaacctgcctgcagatgaagtgccggtaggtaaagacgaaaatgacaacgttgaagtcagccgctggggtaccccgcgtgagtttgactttgaagttcgtgaccacgtgacgctgggtgaaatgcactctggcctcgactttgcagctgcagttaagctgactggttcccgctttgtggtaatgaaagggcagattgctcgcatgcaccgcgcactgagccagtttatgctggatctgcataccgaacagcatggctacagtgagaactatgttccgtacctggttaaccaggacacgctgtacggtacgggtcaactgccgaaatttgctggcgatctgttccatactcgtccgctggaagaagaagcagacaccagtaactatgcgctgatcccaacggcagaagttccgctgactaacctggtgcgcggtgaaatcatcgatgaagatgatctgccaattaagatgaccgcccacaccccatgcttccgttctgaagccggtagttatggtcgtgacacccgtggtctgatccgtatgcaccagttcgacaaagttgaaatggtgcagatcgtgcgcccagaagacagtatggcggcgctggaagagatgactggtcatgcagaaaaagtcctgcagttgctgggcctgccgtaccgtaaaatcatcctttgcactggcgacatgggctttggcgcttgcaaaacttacgacctggaagtatggatcccggcacagaacacctaccgtgagatctcttcctgctccaacgtttgggatttccaggcacgtcgtatgcaggcacgttgccgcagcaagagcgacaagaaaacccgtctggttcataccctgaacggttctggtctggctgttggtcgtacgctggttgcagtaatggaaaactatcagcaggctgatggtcgtattgaagtaccagaagttctgcgtccgtatatgaacggactggaatatattggctaatacccaatttttctgaatctaaaaagcgcctgcgggcgctttttttgtctccctttgataccgaacaataattactcctcacttacacgtaatactactttcgagtgaaaatctacctatctctttgattttcaaattattcgatgtatacaagcctatatagcgaactgctatagaaataattacacaatacggtttgttactggaatcaatcgtgagcaagcttgagtgagccattatgaaaacgaaaatccctgatgcggtattggctgctgaggtgagtcgccgtggtttggtaaaaacgacagcgatcggcggcctggcaatggccagcagcgcattaacattaccttttagtcggattgcgcacgctgtcgatagcgccattccaacaaaaagtgacgaaaaggttatctggagcgcctgtacagttaactgtggtagtcgctgcccgctacgtatgcacgtcgtggacggtgaaatcaaatatgtcgaaacggacaataccggcgatgacaattacgacggcctgcaccaggttcgcgcctgcctgcgtgggcgttccatgcgtcgccgtgtctacaatccggaccgcctgaaatatccgatgaaacgagtcggggcgcgcggtgaaggcaaattcgagcgcattagctgggaagaagcctacgacatcatcgcgaccaatatgcagcgcctgatcaaagagtacggcaacgagtctatctatctgaactatggcaccggtacgctgggcggcaccatgacccgctcctggccgccgggaaataccctggtcgcgcggctgatgaactgctgcggcggctatctgaaccattacggcgactactcctccgcgcaaattgcggaaggtttgaactatacctacggcggctgggcagatggcaacagcccgagcgatatcgaaaacagtaagctggtagtgctgtttggtaataaccctggcgaaacgcgaatgagtggcggtggggtgacttactatcttgaacaggcacgccagaaatctaatgcccgcatgatcatcatcgatccgcgctataccgacaccggtgccgggcgcgaagatgagtggatccctattcgtccgggaacagatgccgcactggttaacggtctggcgtacgtcatgatcactgaaaacctggtggatcaggcattcctcgataaatattgcgttggctacgatgagaaaaccctgccagccagtgcgccgaaaaatggccactataaagcttatattctgggtgaagggccagatggcgtggctaaaacgccggaatgggccagccaaatcactggtgttccggcagacaaaatcatcaaattggctcgtgaaatcggtagtaccaaaccggcgtttatcagccagggatggggcccgcagcgtcacgctaacggtgaaatcgcaacccgtgctatcagcatgctggcgattctgaccggtaacgttggtattaacggaggcaacagcggcgcgcgtgaaggtagttacagcttaccgtttgtccgtatgccgaccttggaaaacccgatccagaccagcattagcatgtttatgtggaccgatgccattgaacgtggcccggaaatgacggcgctgcgtgatggtgtacgcgggaaagataagctggatgtgccgatcaaaatgatctggaactatgccggtaactgcctgattaaccagcattctgaaatcaaccgtacccatgaaatccttcaggatgataagaagtgcgagctgattgtggttatcgactgccacatgaccagtagcgcgaaatatgctgacatcctgctgcctgactgcaccgcttccgaacagatggactttgcgctggatgcatcctgcgggaatatgtcttacgtgattttcaacgatcaggtgattaaaccgcgctttgaatgtaagaccatctatgaaatgaccagcgaactggcaaaacgtcttggcgttgagcaacagtttactgaaggccgtacccaggaagagtggatgcggcatctgtatgcccagagccgggaagcgattcctgaactgccaacgtttgaagagttccgcaagcaggggatctttaaaaagcgcgacccacaagggcatcacgttgcttataaagccttccgtgaagatccgcaggcaaacccactgactacgccaagcggcaaaattgagatttatagccaggcgctggctgacattgccgctacctgggaattgcctgaaggcgatgtgatcgatccactgccgatctacacgccgggctttgaaagttatcaggatccgctgaacaaacagtatccgctgcagcttacaggtttccactataaatctcgcgttcacagtacttacggcaacgttgatgtgctgaaagcggcttgccgtcaggaaatgtggatcaacccgcttgatgcccaaaaacgcggtatccacaacggcgataaagtcaggatctttaacgatcgtggtgaggttcatattgaggcgaaagtgacgccacgaatgatgccgggtgtggtcgcactgggtgaaggtgcctggtatgacccggatgcaaaacgtgtcgataagggtggttgtattaacgtactgaccactcaacgtccgtctcctctcgctaaggggaatccgagtcatacaaaccttgttcaggttgaaaaggtgtaaggagtaaccgatgacaacccagtatggattttttattgattccagccgttgcaccggttgcaaaacctgcgagctggcctgtaaagactacaaagatttgacgccagaagtcagcttccgccgcatttatgaatatgctggcggcgactggcaggaagataacggtgtctggcaccagaacgtgtttgcctactatctgagcattagttgtaaccactgcgaagatccggcttgtactaaagtctgcccgagcggtgcgatgcataaacgtgaagatggttttgttgtggtcgatgaagatgtgtgcattggctgccgctactgccatatggcttgcccgtatggcgcaccgcaatataacgaaacgaaaggccatatgaccaaatgcgatggttgttatgaccgtgttgcggagggtaaaaagccgatctgtgttgaatcttgtccgctgcgggcgctggatttcggccctatcgacgagctgcgtaaaaaacatggcgatctggcggccgttgcgccgttgccgcgagctcactttaccaaaccgaatattgtgatcaaacccaatgccaatagccgcccgaccggggataccactggctatctggcaaacccgaaggaggtgtgagatgggaagtggatggcatgaatggccgctgatgatcttcacggtcttcgggcaatgtgtagcaggtggttttatcgttctggctttggcgctgctcaaaggcgacctgcgagcagaagcccagcagcgtgttatcgcctgcatgtttggtttatgggtgctgatgggcattggctttatcgcctctatgctccatcttggtagtccaatgcgcgcttttaacagcctcaaccgggtaggggctagtgcactcagtaacgaaatcgccagcggtagcatcttttttgccgtaggcggcatcggctggttgctggcaatgctgaaaaagctgagtccggcattgcgtacgctgtggctgatagtgacgatggttcttggcgtcatctttgtctggatgatggtgcgtgtgtataacagcattgataccgttccgacctggtacagcatctggacgccgatgggcttcttcctgacgatgtttatgggcggcccgttactgggttacctgttgttgagtctggctggcgtcgatggctgggcgatgcgtctgctgccagcaatttctgtactggcactggtagtgagtggcgtggtgagtgtgatgcagggcgcagagctggcgactattcatagttctgtgcagcaggccgcagcgctggtgccggactatggtgcgctgatgtcctggcggatcgtgcttttggccgttgccctgtgcttgtggattgcaccacagctaaaaggttatcagcctgcggttccgctactttctgtaagtttcattctgcttctggcaggggaattaatcggtcgcggcgtattctatggtttgcatatgaccgtggggatggccgtcgcaagctaatcataacaaccggggtttcggccccggttctcttttatttctgcttcgttaacgtgtcataactggtcatcaaattacgataatcaggaatgtggttagagaacaacgtcgccagtccttcaatatcattacgccagtcgcgatgcagctcgcacgccacgccgaaccatgtcatcaattgcgcaccagcttggctcaagcgatcccatgcgctatgccgggtaatttcattaaaggtcccactcgcgtcagtcacgacaaagacgtcaaacccttcttcaatggcactaagcgccgggaatgccacgcaaacttcggttaccacaccggcaataattaactgttttttacctgtcgctttgacagcttttacaaaatcttcgttatcccaggcgttaatatttcccgggcgagcaatgtaaggtgtatcggggaattgtgctttcagttctggaactaatgggccgttaggaccggtttcaaaactggtggtaagaatagttggtaagttgaaatacttagccaggtcacccagcgccagcacgttatttttaaacttatcgggttcgatatcccgtacaagggaaagtaaaccagcctggtgatcaacaagcaaaacggcagcatcatttttatcaagacgaacatacggtttggtcatcctcttctcctttcgagagtcagtggtacgtctgaaatcgatcagacgcgatgcattgctctgaaagcatagacgggaaatatgagtttgctgtgaccatgaaatttttcgactgaacgaagcgtatgaaatttgtgttagttcaataaaaacaatcagatgagactaatcatctcttcagcattagcgttatgaatgagtaatataaatcgataataccgccgctgggatatcgcgtattttcacccattgacaatgtttttggcggtggcatgatgcgcatgaaatttgaacttcctcacggttttaattcatgtccacgtatacccagcctgtcatgcttttgctgtctggcctgcttttgttgactctggcgattgcggtgttaaatacactcgtgccgctttggctcgcccaggaacacatgtccacatggcaggtaggcgttgtcagcagttcctattttaccggcaaccttgtcggtacattgctgacagggtatgtcattaagcgcattggctttaaccgcagctattatctggcctccttcatttttgccgctggctgtgccggccttggcctgatgattggattctggagctggttggcttggcgttttgtcgcgggcgtcggctgtgccatgatttgggtggttgttgagagcgcgctgatgtgcagtgggacgagtcgtaaccgtgggcgtttgcttgctgcgtatatgatggtttattacgtgggaacgtttttaggccagttactggtcagcaaagttagtaccgagctgatgtccgtattgccgtgggttacaggtttgacgttggcagggatcttaccgctgttgtttacgcgtgtgctgaatcagcaggctgaaaaccatgatagcacgagtattacgagtatgctaaaactccgtcaggcgcggcttggcgtgaatggctgcattatcagtggaatcgttctgggatctctatatggcctgatgccgctgtacctcaatcacaaaggggtgagcaatgccagcattggtttctggatggcggtactggtcagtgcgggtatccttggacaatggccgattggacgtctggcggataagtttggtcgactgctggtgttgcgtgttcaggtctttgtcgtcattctcggcagtatcgcgatgcttagccaggcggcgatggccccagcgttattcatcctcggtgccgctggctttacgctatatccggtggcgatggcatgggcttgcgagaaagttgaacatcatcaactggtggcgatgaaccaggccttactgttgagctatactgtgggaagtctgcttggcccgagttttaccgctatgctaatgcagaatttctccgataatttattgtttatcatgatcgccagcgtaagctttatctatttgctgatgctgctgcgcaacgccggtcatacgccgaaacccgttgctcacgtgtaaatgaattcaagcagagtgtgaacttactgtttcacactctgcttttttgtttcttctatctgacttgctttattccaaattttattcgtttaaaaataaaatgtgcagcaggttataattttgcatttcgctatttccgcacttcttatttgccgcgcataatccctcgttttaccgatgcccctttaattttggcgaaggatttgtctatggctgggaatgttcaggaaaaacagttgcgatggtacaacattgcgctgatgtcttttatcactgtctggggttttggcaacgttgttaataactatgccaaccaggggctggtggttgtttttagttgggtgtttatctttgcactctatttcacaccttatgcgctaattgttggtcagttaggcagcaccttcaaagatgggaagggcggggtcagtacctggattaaacacacgatgggacccggactggcttatctcgccgcgtggacctactgggtggtgcatattccctatctggcacaaaaaccccaggcaattctgattgcgctcggttgggcgatgaaaggcgacggtagcctaatcaaagaatatagtgtcgtagcgttacaggggttaacgctggtgctgtttatcttctttatgtgggttgctagtcgcggtatgaaaagcctgaaaatcgtcggttctgtggcagggattgctatgtttgttatgagtctcctgtatgtggcgatggcggtaaccgcgcctgcaattactgaagtgcatattgcgaccacaaacattacctgggaaacgttcattcctcatatcgactttacctacattaccactattagtatgctggttttcgcggttggcggagcagagaagatttctccttacgttaatcaaacgcgcaacccaggaaaagaatttccaaaagggatgttatgcctggcggtgatggttgcggtttgtgccattctgggcagcctggcgatggggatgatgtttgatagccgtaatatcccggatgacttaatgaccaacggtcagtattacgcctttcagaagctgggcgagtattacaacatgggtaatactttaatggtgatttacgccattgcgaataccctgggacaagtagcggcgctggtattcagcattgatgccccgcttaaagtgctattaggtgatgctgacagcaaatatattccagccagtttatgtcgtaccaacgcttctggtacgcccgttaatggctattttctgaccctggtactggtggcgattctgattatgctgccgactctcggcattggtgatatgaacaatctctataaatggctgttgaaccttaatagcgtagtgatgccgctgcgttatttatgggtatttgttgcatttattgcagtcgttcgcttggcgcagaaatataaaccagaatatgtctttattcgtaataagcctctggcaatgaccgtcgggatttggtgttttgcctttaccgcctttgcctgtttgacggggatcttcccgaaaatggaagccttcactgcagagtggaccttccagttggcgctgaatgttgcaacgccgtttgtgctggtaggattaggactgatattcccgctgctggcgcgtaaagcgaatagtaaataattattgtggtcggtgacgctgactctggcagatctgacccgtttttacataatcgagaaatgcgcgcaagccgcaggacatatactggcggtttggataatagatctggaagcctggacgctctgtgctccagtcttccagtacacattctaaacgaccagtatcaaggtactccttgatctgttcatagagcagatacccgataccagcacccatcaaaacggcctccagttcagcatcaacatcatccagaatgatatttcctgcgacagcaatttccagctcctttgcaaattgccagtggaaaggtttgccgctgggataacgaaaaacaacacattgatgattaagcagatcatgaggatggcggggtttgccatatcttgcaaagtactctggcgttgctgctacacataatttcactggcgggccgatcgccacgctgatcatatctttttcgacgatgcaactaagtcgaacgccagcgtcaaagccctgttggacgatatcgacaagagagtcgtcagttgtgagctcgactttaatatcaggatattcacgtgtgaaaccaaccagtaaagacattaaaaatatacgtgcagctacccgggcggcattgattttgagcgttcctgtcggtgtcagacgaaaatcattcatctcatctaacatgatctgaatttcgtcgaaagctgggcgcaatcgttcatagagattagaacccgcttccgttaagcttacgcttcgggttgtccgattgaataagcgaattttaagacgttgttccagtgttttaatactatggctaatggcggagctggataagcctaactcatcgcccgctgcacgaaagctttgattacgggccacggcaaagaaagtggcaaagtcagacatattcatccgcattagtgaaaatccttcattaactcatcctgaatcatcacgtttacaggattatgccgcctgcgtaaagtgcgctccagaacttaacgtggaggtaaaattatgcagtctgaacgtatttatttggtatgggcccatcctcgtcatgatagtttgaccgcacatattgctgatgcgatccatcagcgggcaatggagcggaaaatacaggtgacggaactcgatttatatcggcgtaatttcaacccagtgatgacgccggaagatgaaccagactggaagaatatggataaacgttattctccagaggttcatcagctttatagtgagctgcttgaacatgacacgttagtggtggtttttcctctctggtggtacagcttcccggcaatgctaaaaggatatattgacagagtatggaataatgggctggcttatggagatgggcacaaattaccattcaataaagttcgttgggtggcgctggttggaggagacaaagaaagttttgtccagatgggctgggaaaaaaatataagcgattatttaaaaaatatgtgcagttatcttggtattgaagatgccgatgtcactttcttgtgtaatacagtggtattcgatggggaagaacttcacgcgagctattatcagagcttattatctcaggtacgggatatggtagatgcactataagatgtgttaaaaacgctgtagcagaatgaagcgcggaataaaaaagcggcaactcaataaagttgccgctttacggggaaattagaacattaccttatgaccgtactgctcaagaatgcctttcacgcgttccatggtctctttcttcggtggtttaacaccgtcgagtttgtactcttcacccattgccacccatttgtgtttgcccagctcgtggtaggggagaagctcgattttctcaacgttgcccatatcacgggtaaattcaccgaggcgatgcgcactatcgtcatcgtcagaccagcctgggacaacaacgtagcggatccacaccttcacatttttgttcgccagatatttagcgaactccagcgtgcggtggttggaaactccaaccagattttggtggatctcgtcgttcatctgtttgagatcgagcattaccaggtcggttacttccagcagttcatcaatcaccggatcgtaacgacgaacaaaaccgttggtgtccagacaggtatgaatgccttcttttttgcaggcgcggaaccagtcacgaacaaactcagcttgcaggattgcttcaccgccggatgcggtaacgccgccgccggaagcgttcataaagtggcgataggtcaccacttccttcatcaaatcttcaacggtaacttctttaccgccatgcgtgtcccaggtgtcgcggttatgacaatacaggcagcgcatcaggcagccctggaaaaaggtgataaagcgaatacctgggccgtctacggttccacaggattcaaaggagtgaatgcgaccaataacactcattgcggtgtttctccagatgtggcccatctgaggccgtgttggtgcgcagctcgaaggctacgtcgagtctgttttggcagtcaccttaaagtatagatagctgacaaaaaaggctctcgcgctaaaaaaggccccactttcgtggagcctttattgtacgctttttactgtacgatttcagtcaaatctaattacatagattgagtgaaggtacgagtaataacgtcctgctgctgttctttagtcaggctgttgaaacgtactgcgtagccagatacacggatggtcagctgcggatatttttccgggttttccatcgcgtcgagcagcatttcacggttcatcacgttaacgttcaggtgctgaccaccttcgatggatgcttcgtggtggaagtaaccatccatcagaccagccaggttggtcttacgaacttcgtcgtctttacccagtgcgttcggaacgatagagaaggtgtaggagataccatctttagcgtaagcaaacggcagtttagcaacggaagtcagagaggctactgcacctttctggtcacgaccgtgcatcgggttagcacccggtccgaacggcgcgccagcacgacgaccgtctggggtgttacccgttttcttaccatacacaacgttagaagtgatggtcagaacagactgagtcgggatagcgtcacggtaggtgtgcagtttctgaattttcttcatgaaacgttctaccaggtcaacagccaggtcatctacacgcggatcattgttaccaaactgcgggtattcgccttcgatttcgaagtcgatagccagaccgtcttcgtcacgaatcggtttaactttcgcatatttgattgcagacagggagtcagcagcaacggacagaccagcgataccacacgccatggtgcggataacgtcacggtcgtgcagcgccatcagagaggcttcgtagctgtacttgtcgtgcatgtagtggatgatgttcagtgcagtgatgtactgtttagccagccagtccatgaagtgatccatgcgctccatcacttcatcatagttcaggacatcgcctttgatcggttcagacttcggaccaacctgcattttcagtttttcgtcaacgccgccgttgattgcgtacagcatggttttcgccaggtttgcacgcgcaccgaagaactgcatttgtttaccaacgatcatcgggcttacgcagcaagcaatagcgtagtcatcgttgttgaagtccggacgcatcaggtcatcgttctcatactgcagagaagaggtgtcgatggacactttagcggcgaatttcttgaagttcagcggcagtttttcagaccacagaatggtcatgttcggttccggagacggacccatggtgtacagggtgttcaggaaacggaagctgtttttggtaaccagggtacgaccgtcgaggcccataccaccgatagattcggttgcccagatcgggtcgccagagaacagttcatcgtattccggagtacgcaggaagcgaaccatacgcagtttcatgaccaggtggtcaaccatttcctgcgcttcttgttcggtgatcttgccagctttcaggtcacgttcgatgtacacatccaggaaggtggaggtacgaccgaaggacattgcagcaccgttctgagacttaacagcagccaggtagccgaagtaagtccactggatagcttcctgagcgttggtagccggaccagagatgtcgtagccgtatttcgcagccatttctttcatctgacccagagcgcggtgctgttcagcgatttcttcgcgcagacggatagtctgttccaggtttacgccgttttccagatcagcctgcagagaagtgaactgtgccagtttgtctttcatcaggtagtcgataccgtacagcgcaacgcgacggtagtcaccgatgatacggccacggccatatgcatctggcagaccggtcagaacaccagatttacggcaacgcaggatgtccggagtgtaaacgtcgaacacgccctggttgtgagttttacggtattcagtgaagatttttttgatcatcggatccagttcgcggttgtacgctttgcaggaaccttcgatcattttgataccaccgaacgggataagagcacgtttcagcggagcttcagtctgcagaccaacgattttctcaagctgcttgttgatgtagccagcgtcgtgagaggtgatggtggaagcaacagcggtgtcaaagtcaactggcgcgtgagtgcggttttccagtttaacgccttccattactttgtcccacagggtggtggtcgcttcagtagcgccagccaggaaggactcgtcaccctcgtacggagtgtagtttttctgaatgaagtcacggacgtttacttcattctgccagtcacctttggtaaaaccttcccaggctgtggctaacttttcattaagctcggacatgtaacacctaccttcttaagtggattttttatttactgcgtacttcgacaaccattaatggtggtcgttttcacgcaggtaaatgacccagtatgtcaacccaaccaacaaaccaccaccgataatgttgccgatcgtaaccggaatcaggttatcagtgatgaaattcatcacggtcaggtgagaaaaattttccggtgcagaaccgactgcggtccaaaattccggggatgcgaagtcgcggattacaatacccatcgggatcataaacatgtttgcgatactgtgctcaaaaccgctggcaacaaacatcgcgaccggcagcaccataatgaacgctttgtccatcaggctgcggccagaataactcatccatactgccagacataccatcaggtttgccaggataccaagacagacggcctcaataaaagtatggtgcactttgtggtcggcggtttgtaggacgtttagtccccattgaccatttgcggtcatatactcgccggaaagccacattaaaagtacaaacagcagtgcgccgaccaggttgccaaaatagacatttagccagtttttcgccaactgaccccaggtgatgcgcccactcgccttagcaacaacaatcaacacggtggaagtaaagagatcggctccgcagacaacacaaagaatcagccccagagagaagcaaatgccgccaaccagttttgccatgccgaagggcattgtgcctgtgccagtggttgctgtgatatagaagacgaatgcgatactgatgaaaacaccggcggtaatcgccagatagaaagtcttaagcggatgtttcgttgctttatagacacccgcctcttcggccactttggccattgcagcaggaagtaaaagatcaaaagggttgtcagctttcacactaactctctctttattaagtcggcgacgagatactaacaaagcattatagatgagaaattgatatagatcatatctcgcctggcttataggcccgtaactcgcatggtttttatgcaaatacggagtaaatatttgattatccaaataaaaataaattttaaaaattaacaaatgagttgaattttttccgcatcctccgctaaaacagttaattaaaagggagcatcaggcgaataaagtaacaatatcgatcgtatttattaaatacaaattaccgatatttaaccttataattacaattattttattaatgcaaatatatgtaaagcggggcattaaaaaaacgccccgtaatataactcagactaatcattaagcctacattgcgtaggctatttgattttattttgcccagaatgctgctttggcgcgctgcagcttttcgtaggccttcaacaagctctgatgtgcagcaaacgcgtgcagatcgctatctaccggttgcaggccgtaaaacgccgcttcgccgctcattgccgcactggcggcttctacggcatctgcgccgtacatgcgaacaaacgcattcagatattgcagcggctggcgatcttcttcctgtgccagtaataacaacgtttgcaggcagcgataatagttggcgcgttccggactaaatacactactgttaaactccatcgtccattcggtccagaccagagcctgttccagatcgccaccagccagcgccagcatggcttttaattcaccgatacgcagggtgtaccaaccgttatcgctcccggtcgccagacccaacagctcacgcacgcgggtaaagtcatcaaaaccttcttcatccagttgctcgatgaggttcaggtaatcttctttttcccactcgctgcctggtaggctaagaatcgtttcacgtaaatggctgcccatactgttattcgcgagccacagatcttcagccggataaatatcggacatgccaggcacgataatacggcaagcataaacgcccagatgctcgtaatcggcaatataaacttctttatcttctttgttgaagatagccatcagtgtggcgaactcttcttccgtggtgccggagaaattccagtccacaaacggataatcggcatcctgcttgaacaggtcccaggagattaaaccgctggaatcgataaagtgcgtttcgaggttggtatgttcagcgacttcttcatcatcgaaggttggcggagtaaacacatccaaatctttcaggccacgaccttgcagcagctcggtcacggtacgttccagtgctacgccaaaatcaggatgcgcaccgaaagaggcaaagcaggtaccgttagcaggattgaacagtaccacgcaaatcaccggatactggccgccaaggctaccgtcataagcgaagattgggaaaccctccgcttccagcgtttcgatggcttcaactactgctgggtaacgcgccagcacgtctgccgggatctctggcaggctgatgctttcagcaataatgcggtttttcacgtagcgttcgaaaacttcagacaatccctgaacgcgtgcttcgttgcgggtattacctgcggacataccgttggagacgtacaggttaccaatgatattcatcggaatataaacggtctgattgtcggactgacgcgtaaacggcaggccgcaaataccacgatcttcgttaccggattgtaggtcaatcagcatgctgccggtcagttcattctccggatcataaaacgcgcgcagacggtcatcgagcagcccttctggcacatcgtcattttcggtcagtgggaaccatttttcgttgggataatgcacgaacggaccgttggcgatggtttcgcccagccagaagtccgcaaaaaagtagttggtactgagacgctcgaaatattcaccgagtgcagaagccagcgccgctttcttggttgcgcctttaccgttggtaaaacacagtgcgcactctttgtcgcgaatatgtacagaccagacgttaggcacgggattcagccaggaggcctcttcaatctgaaagccgaggtcactaagtttttgctggaagcgagcgatggaatcttccagagcggcatctttgccggggataaatgtttgcgtcatgaaaatcactttagtcgtacggaaagcgcgcaataatacgggttttatctcaaaggcgctatcaccgccgccatgccgatgaactgttgactatgcttttagcggataaaccacgttaagagcataaaaatgaaggcgttcgatctccaccgtatggcatttgataaagtgccttttgatttccttggcgaagttgcactacgtagtctttatacctttgtactggtctttttgttcctcaaaatgaccggaagacgcggtgtgcggcagatgagcctgtttgaagttttaatcattctgacgctgggaagtgcggcgggagatgtggcgttttatgatgatgtgccgatggtcccggtacttatcgtctttattactctggcgttgttataccgcctggtaatgtggttgatggcgcacagtgaaaaactggaagatcttctggaaggcaagccagttgtcattattgaagatggcgagctggcctggagcaaactcaataactccaacatgacggaatttgagttctttatggagctacgattgcgtggcgtggagcagctggggcaggtacgtctggcgattctcgaaaccaacgggcaaatcagtgtctatttctttgaagatgacaaggtgaaaccgggtttacttattttacccagtgattgtacgcagcgttacaaagtggtgccggagagcgcggactatgcctgtattcgttgtagtgaaatcattcatatgaaagcgggggaaaaacaattatgtccgcgctgtgcaaatccagaatggacgaaggcaagtcgggcaaaacgggtgacctgacagtaaaaacatcggctttttgctaataatccgagagattcttttgtgtgatgcaagccacatttttgccctcaacggttttactcattgcgatgtgtgtcactgaatgataaaaccgatagccacaggaataatgtattacctgtggtcgcaatcgattgaccgcgggttaatagcaacgcaacgtggtgaggggaaatggctcaaatcttcaattttagttctggtccggcaatgctaccggcagaggtgcttaaacaggctcaacaggaactgcgcgactggaacggtcttggtacgagcgtgatggaagtgagtcaccgtggcaaagagttcattcaggttgcagaggaagccgagaaggattttcgcgatcttcttaatgtcccctccaactacaaggtattattctgccatggcggtggtcgcggtcagtttgctgcggtaccgctgaatattctcggtgataaaaccaccgcagattatgttgatgccggttactgggcggcaagtgccattaaagaagcgaaaaaatactgcacgcctaatgtctttgacgccaaagtgactgttgatggtctgcgcgcggttaagccaatgcgtgaatggcaactctctgataatgctgcttatatgcattattgcccgaatgaaaccatcgatggtatcgccatcgacgaaacgccagacttcggcgcagatgtggtggtcgccgctgacttctctagtaccattctttcccgtccgattgacgtcagccgttatggtgtaatttacgctggcgcgcagaaaaatatcggcccggctggcctgacaatcgtcatcgttcgtgaagatttgctgggcaaagcgaatatcgcgtgtccgagcattctggattattccatcctcaacgataacggctccatgtttaacacgccgccgacatttgcctggtatctatctggtctggtctttaaatggctgaaagcgaacggcggtgtagctgaaatggataaaatcaatcagcaaaaagcagaactgctatatggggtgattgataacagcgatttctaccgcaatgacgtggcgaaagctaaccgtagccggatgaacgtgccgttccagttggcggacagtgcgcttgacaaattgttccttgaagagtcttttgctgctggccttcatgcactgaaaggtcaccgtgtggtcggcggaatgcgcgcttctatttataacgccatgccgctggaaggcgttaaagcgctgacagacttcatggttgagttcgaacgccgtcacggttaatgccgaaattttgcttaatccccacagccagcctgtggggtttttatttctgttgtagagagttgagttcatggaatccctgacgttacaacccatcgctcgtgtcgatggcactattaatctgcccggttccaagagcgtttctaaccgcgctttattgctggcggcattagcacacggcaaaacagtattaaccaatctgctggatagcgatgacgtgcgccatatgctgaatgcattaacagcgttaggggtaagctatacgcttagtgccgatcgtacgcgttgcgaaattatcggtaacggcggtccattacacgcagaaggtgccctggagttgttcctcggtaacgccggaacggcaatgcgtccgctggcggcagctctttgtctgggtagcaatgatattgtgctgaccggtgagccgcgtatgaaagaacgcccgattggtcatctggtggatgcgctgcgcctgggcggggcgaagatcacttacctggaacaagaaaattatccgccgttgcgtttacagggcggctttactggcggcaacgttgacgttgatggctccgtttccagccaattcctcaccgcactgttaatgactgcgcctcttgcgccggaagatacggtgattcgtattaaaggcgatctggtttctaaaccttatatcgacatcacactcaatctgatgaagacgtttggtgttgaaattgaaaatcagcactatcaacaatttgtcgtaaaaggcgggcagtcttatcagtctccgggtacttatttggtcgaaggcgatgcatctagcgcttcttactttctggcagcagcagcaatcaaaggcggcactgtaaaagtgaccggtattggacgtaacagtatgcagggtgatattcgctttgctgatgtgctggaaaaaatgggcgcgaccatttgctggggcgatgattatatttcctgcacgcgtggtgaactgaacgctattgatatggatatgaaccatattcctgatgcggcgatgaccattgccacggcggcgttatttgcaaaaggcaccaccacgctgcgcaatatctataactggcgtgttaaagagaccgatcgcctgtttgcgatggcaacagaactgcgtaaagtcggcgcggaagtggaagaggggcacgattacattcgtatcactcctccggaaaaactgaactttgccgagatcgcgacatacaatgatcaccggatggcgatgtgtttcagcctggtggcgttgagtgatacaccagtgacgattcttgatcccaaatgcacggccaaaacatttccggattatttcgagcagctggcgcggattagccaggcagcctgaatgaacaacgggcaataaatagccaaatctttctttatcaaaacgtcggcacattgtcggcgttttttttcggaccttgtgagtcattttgattaatggtagcgtcgcttgtcaatgtaagttgttgatacataatatttatatatgattaatcaacggatgattcacatgaagaatactaaattactgctggcgattgcgacctctgcagcattactgacagggtgtcaaaatacccacggtattgataccaatatggctatcagctccggtttaaatgcctataaagcagcaacattaagcgatgccgatgcaaaagcgattgccaatcagggctgtgccgaaatggacagcggcaatcaagtcgcaagtaaatccagcaagtacggtaaacgtctggcaaaaatcgccaaagcattgggtaacaatattaatggcacgccggtcaactataaggtttatatgaccagcgacgtcaacgcatgggcgatggcgaacggctgtgttcgtgtctacagtggcctgatggacatgatgaatgacaacgaaattgaaggcgttctgggccatgaactgggccacgtcgcgttgggtcacagcctggctgaaatgaaagcttcttatgcgatcgttgccgcacgcgatgccattagtgctaccagcggtgtggcttcccagctttcccgcagtcaattaggtgatatcgcagaaggcgctatcaatgctaaatactcccgtgataaagagtccgaagcagatgatttctcctttgatctgttgaagaaacgtggcatcagcacccaggggctggttggcagctttgaaacactggctagcctggatggcggtcgcacccagtccatgtttgactctcacccaccaagtacagagcgtgcgcaacacatccgtgatcgtatcgcctctggtaagtaaatcattgtcatctttcgggctggtcttctgccagcccgctataattgcgcaataaatccccatctgaatacagacaaaactggtttttgcacacaacgttaacgatttgtggcgtcggcgcgtataatgcgcgcggttatgttaacggtacgcctgttttaaggagataaagatgacggcaattgccccggttattaccattgatggcccaagcggtgcagggaaaggcaccttgtgtaaggctatggcggaagcgttgcaatggcatctgctggacagcggtgcaatttatcgcgtactggcattggcggcattacatcaccatgttgatgttgcgagcgaagatgcgctggtaccgctggcatcccatctggatgtacgttttgtgagcaccaatggcaatctggaagtgatcctcgaaggggaagatgtcagcggcgaaattcgtactcaggaagtggcgaatgcagctagtcaagtcgcggcattcccacgcgttcgtgaagcattattgcgtcgccaacgcgcgtttcgcgaattaccaggtctgattgccgatggccgcgacatgggaacggtggtattccctgatgcaccagtgaaaattttccttgacgcctccagcgaagaacgtgcgcatcgccgcatgctacagttgcaggagaagggctttagtgttaactttgagcgccttttggccgagatcaaagaacgcgacgaccgcgatcgtaaccgagcggtagcgccactggttccggcagccgatgctttagtgttggattccaccaccttaagcattgagcaagtgattgaaaaagcgctacaatacgcgcgccagaaattggctctcgcataagcgaccgaatttgcagtacccccgttgcaatggaatgacagcgggtatgttaaacaaccccatccggcatggagccaggtggacgttaaatataaacctgaagattaaacatgactgaatcttttgctcaactctttgaagagtccttaaaagaaatcgaaacccgcccgggttctatcgttcgtggcgttgttgttgctatcgacaaagacgtagtactggttgacgctggtctgaaatctgagtccgccatcccggctgagcagttcaaaaacgcccagggcgagctggaaatccaggtaggtgacgaagttgacgttgctctggacgcagtagaagacggcttcggtgaaactctgctgtcccgtgagaaagctaaacgtcacgaagcctggatcacgctggaaaaagcttacgaagatgctgaaactgttaccggtgttatcaacggcaaagttaagggcggcttcactgttgagctgaacggtattcgtgcgttcctgccaggttctctggtagacgttcgtccggtgcgtgacactctgcacctggaaggcaaagagcttgaatttaaagtaatcaagctggatcagaagcgcaacaacgttgttgtttctcgtcgtgccgttatcgaatccgaaaacagcgcagagcgcgatcagctgctggaaaacctgcaggaaggcatggaagttaaaggtatcgttaagaacctcactgactacggtgcattcgttgatctgggcggcgttgacggcctgctgcacatcactgacatggcctggaaacgcgttaagcatccgagcgaaatcgtcaacgtgggcgacgaaatcactgttaaagtgctgaagttcgaccgcgaacgtacccgtgtatccctgggcctgaaacagctgggcgaagatccgtgggtagctatcgctaaacgttatccggaaggtaccaaactgactggtcgcgtgaccaacctgaccgactacggctgcttcgttgaaatcgaagaaggcgttgaaggcctggtacacgtttccgaaatggactggaccaacaaaaacatccacccgtccaaagttgttaacgttggcgatgtagtggaagttatggttctggatatcgacgaagaacgtcgtcgtatctccctgggtctgaaacagtgcaaagctaacccgtggcagcagttcgcggaaacccacaacaagggcgaccgtgttgaaggtaaaatcaagtctatcactgacttcggtatcttcatcggcttggacggcggcatcgacggcctggttcacctgtctgacatctcctggaacgttgcaggcgaagaagcagttcgtgaatacaaaaaaggcgacgaaatcgctgcagttgttctgcaggttgacgcagaacgtgaacgtatctccctgggcgttaaacagctcgcagaagatccgttcaacaactgggttgctctgaacaagaaaggcgctatcgtaaccggtaaagtaactgcagttgacgctaaaggcgcaaccgtagaactggctgacggcgttgaaggttacctgcgtgcttctgaagcatcccgtgaccgcgttgaagacgctaccctggttctgagcgttggcgacgaagttgaagctaaattcaccggcgttgatcgtaaaaaccgcgcaatcagcctgtctgttcgtgcgaaagacgaagctgacgagaaagatgcaatcgcaactgttaacaaacaggaagatgcaaacttctccaacaacgcaatggctgaagctttcaaagcagctaaaggcgagtaattctctgactcttcgggatttttattccgaagtttgttgagtttacttgacagattgcaggtttcgtcctgtaatcaagcactaagggcggctacggccgcccttaatcaatgcagcaacagcagccgcttaatttgcctttaaggaaccggaggaatcatgaccaagagtgaattgatagaaagacttgccacccagcaaagccacattcccgccaagacggttgaagatgcagtaaaagagatgctggagcatatggccagcactcttgcgcagggcgagcgtattgaaatccgcggtttcggcagtttctctttgcactaccgcgcaccacgtaccggacgtaatccgaagactggcgataaagtagaactggaaggaaaatacgttcctcactttaaacttggtaaagaactgcgcgatcgcgccaatatttacggttaagttttttactcaaacttgaacgagagaaaagcacctgtcgggtgcttttttcatttctctaatctggaactggaagctgcctcgcagagttttgaacagttttcaccctttcgttaaattcttctgaatatgcctcggggaacgcaaaattcccaccagacaaccgctcaacaaagttgcacactttccataaacagggaggggtgcatgaaaataacgacagtcggtgtatgcataattagcggaatttttccgttgctgattttgccccaattgcctgggacattaacccttgcgtttctgactctcttcgcctgcgtactggcatttatccctgttaaaaccgtccgttatatcgcgctgacgttgctgtttttcgtttggggcatattaagtgcaaagcaaattttgtgggcaggagaaaccttaactggcgcgacgcaggatgcaattgttgagatcactgcaactgacggcatgaccactcattacggtcaaattactcatctacaaggtcgacgtatattccctgcgagtggtctcgtgatgtatggcgaatatcttccgcaagcggtttgtgctggacaacaatggagtatgaaactcaaagttcgtgcagttcatggccaacttaatgatggcggctttgatagccagcgttatgccattgcccagcatcagccgctcaccggccgttttctgcaggcaagtgtcattgaaccgaattgtagcctgcgtgcacagtatctggcgagtctacaaacaacgctgcaaccctatccgtggaatgcggttattcttggtttaggtatgggggaacggttatccgtccccaaagaaatcaaaaatatcatgcgcgatactggaacggcgcatttaatggcgataagcggattgcacatcgcttttgcggcgttgctggctgccggactcattcgcagtggacaaatttttctgcctgggcgctggatccactggcaaataccattaattggcggaatctgctgtgctgctttttatgcctggttgacgggaatgcaacctcctgcattgcgtaccatggtggcgcttgctacgtggggaatgcttaagttaagtgggcgacagtggagtggctgggatgtatggatatgttgtctggcggcaattttgctgatggatcctgttgccattctcagccaaagtttatggctctctgccgctgcggtcgcggcattgatattttggtatcagtggtttccctgtcctgagtggcaactgccgccggtattgcgtgcagttgtttccctcatccatctgcaactgggaatcacacttctgcttatgcccgtgcaaatcgtcatatttcatggcattagtctgaccagctttattgcaaatctattagcaattcccttggtgacatttatcacggttccgttgatcctcgccgcgatggttgtgcatttaagcgggccgttaatcctggagcaagggttatggtttcttgccgaccggtctttggctttacttttctgggggttaaagagtttgccggaagggtggatcaacattgctgaatgttggcaatggctaagtttttccccatggttcttactggtggtatggcgattaaacgcctggcgaacgttgccagcaatgtgtgtggctggaggcttgctgatgtgctggccgctgtggcaaaaacctcgacctgacgagtggcagctgtacatgcttgatgtcgggcaagggctggcaatggtgatagccagaaacggcaaagcgattctctatgacacaggactggcctggcctgaaggggatagtgggcaacaactgattatcccctggctccactggcataatcttgaaccggaaggcgttattctgagccatgaacatctggatcaccggggagggctggatagtatattgcatatatggccgatgttatggatcagaagtccgttaaactgggaacatcatcagccctgtgtgcgtggcgaagcgtggcaatggcaaggattgcgtttcagcgcgcactggcctttacaaggtagcaacgataaaggaaataaccattcctgtgtggttaaggttgatgacgggacgaatagcattcttctaaccggtgatattgaagccccagctgaacaaaagatgctaagccgttactggcagcaagtgcaggcaacattgcttcaggtacctcaccatggcagtaataccagtagtagcttgccattaattcagcgagtgaatggaaaagtggcactcgcaagcgcaagccgctataacgcatggcgactgccctctaacaaagttaagcatcgctatcaactgcaaggatatcaatggattgatactccacatcaaggtcaaacaacggtcaattttagtgcgcaaggctggcggattagcagcctcagggagcaaattttacctcgttggtatcatcagtggtttggcgtgccagtggataacgggtaaaatatgcggctatttcaacaaatgctggttttttgaatgcataacgacaaagatctctctacgtggcagacattccgccgactgtggccaaccattgcgcctttcaaagcgggtctgatcgtggcgggcgtagcgttaatcctcaacgcagccagcgataccttcatgttaagcctccttaagccacttcttgatgatggctttggtaaaacagatcgctccgtgctggtgtggatgccgctggtggtgatcgggctgatgattttacgtggtatcaccagctatgtctccagctactgtatctcctgggtaagtggaaaggtggtaatgaccatgcgtcgccgcctgtttggtcacatgatgggaatgccagttagtttctttgacaaacagagtacgggtacgctgttgagtcgtattacctacgattccgaacaggttgcttcttcttcttccggcgcactgattactgttgtgcgtgaaggtgcgagcatcatcggcctgttcatcatgatgttctattacagttggcaactgagcatcattttgattgtgctggcaccgattgttagcattgcgattcgcgttgtaagcaagcgttttcgcaacatcagtaaaaacatgcagaacaccatggggcaggtgaccaccagcgcagaacaaatgctgaagggccacaaagaagtattgattttcggtggtcaggaagtggaaacgaaacgctttgataaagtcagcaaccgaatgcgtcttcaggggatgaaaatggttagtgcctcttccatctctgatccgatcattcagctgatcgcctctttggcgctggcgtttgttctgtatgcggcgagcttcccaagtgtcatggatagcctgactgccggtacgattaccgttgttttctctagtatgattgcactgatgcgtccgctgaaaagcctgaccaacgttaacgcccagttccagcgcggtatggcggcttgtcagacgctgtttaccattctggacagtgagcaggagaaagatgaaggtaagcgcgtgatcgagcgtgcgactggcgacgtggaattccgcaatgtcacctttacttatccgggacgtgacgtacctgcattgcgtaacatcaacctgaaaattccggcagggaagacggttgctctggttggacgctctggtagcggtaaaagtaccatcgccagcctgatcacgcgtttttacgatattgatgaaggcgaaatcctgatggatggtcacgatctgcgcgagtataccctggcgagcttacgtaaccaggttgctctggtgagccagaatgtccatctgtttaacgatacggttgctaacaacattgcttacgcacggactgaacagtacagccgtgagcaaattgaagaagcggcgcgtatggcctacgccatggacttcatcaataagatggataacggtctcgatacagtgattggtgaaaacggcgtgctgctctctggcggtcagcgtcagcgtattgctatcgctcgagccttgttgcgtgatagcccgattctgattctggacgaagctaccagcgctctggataccgaatccgaacgtgcgattcaggcggcactggatgagttgcagaaaaaccgtacctctctggtgattgcccaccgcttgtctaccattgaaaaggcagacgaaatcgtggtcgtcgaggatggtgtcattgtggaacgcggtacgcataacgatttgcttgagcaccgcggcgtttacgcgcaacttcacaaaatgcagtttggccaatgatcgaaaaaatctggtctggtgaatcccctttgtggcggctattgctgccactctcctggttgtatggcctggtgagtggcgcgatccgtctttgctataaactaaaactgaagcgcgcctggcgtgcccccgtaccggttgtcgtggttggtaatctcaccgcaggcggcaacggaaaaaccccggtcgttgtctggctggtggaacagttgcaacagcgcggtattcgcgtgggggtcgtaagccggggatatggtggtaaggctgaatcttatccgctgttattgagcgcagataccacaacagcacaggcgggtgatgaacctgtgttgatttatcaacgcactgatgcgcctgttgcggtttctcccgttcgttctgatgcggtaaaagccattctggcgcaacaccctgatgtgcagatcatcgtaaccgacgacggtttacagcattaccgtctggcgcgtgatgtggaaattgtcgttattgatggtgtgcgtcgctttggcaatggctggtggttgccggcggggccaatgcgtgagcgagcggggcgcttaaagagcgttgatgcggtaatcgtcaacggcggtgtccctcgcagcggtgaaatccccatgcatctgctgccgggtcaggcggtgaatttacgtaccggtacgcgttgtgacgttgctcagcttgaacatgtagtggcgatggcggggattgggcatccgccgcgcttttttgccacgctgaagatgtgtggcgtacaaccggaaaaatgtgtaccgctggccgatcatcagtctttgaaccatgcggatgtcagtgcgttggtaagcgccgggcaaacgctggtaatgactgaaaaagatgcggtgaaatgccgggcctttgcagaagaaaattggtggtatttgcctgtagacgcacagcttagtggtgatgaaccagcgaaactgcttacgcaactaaccttgctggcttctggcaactaattacgccgcggcagcgttcgattgatggagtcatgaatgagcctgccgcacctctcccttgctgatgcgcgtaatcttcaccttgccgcacaaggcctgttaaacaaaccccgccgtcgagcgagcttggaggatattccggcaacgatctcccgcatgtccttgctgcaaatcgataccatcaatattgttgcccgtagtccatatctggtgcttttcagtcgtctgggaaattatcctgcccagtggctggatgagtctctggcgcgtggcgaattaatggaatactgggcgcatgaagcctgctttatgccgcgtagcgactttcgtcttattcgccaccgcatgctggcacctgaaaaaatgggctggaaatacaaagacgcctggatgcaggaacatgaggcggaaattgcacagttaattcagcatattcatgataaggggccggtacgtagtgccgattttgagcatcctcgtaaaggtgcaagcggctggtgggaatggaagccgcataaacggcatctggaaggtttatttactgccggaaaggtgatggtgattgaacggcgcaacttccagcgcgtttatgatttaacccaccgtgtcatgcctgactgggatgatgagcgcgatctcgttagccaaacagaagcagaaatcatcatgctggataacagtgcgcgtagcctgggaatattccgcgaacagtggctggcagattactatcggctgaaacgtccggcactggcggcgtggcgcgaagcgagggctgaacagcagcaaatcattgctgtgcatgttgaaaaattgggcaatctttggctgcatgatgatttgctgccgctactcgagcgagcgctggccggaaagctcactgcaacgcacagcgcggtacttagcccttttgatcctgttgtctgggatcgcaaacgcgcagagcagctttttgattttagctaccggctggagtgctataccccagcgccgaaacgccagtatggctattttgttctgccgttattacatcgtgggcaattagttgggcgaatggatgccaaaatgcatcgccagacaggcatccttgaagttatctctctgtggttacaggaaggtattaaaccaacgacaacgctgcaaaaagggctacgtcaggcgattactgatttcgctaactggcagcaggcaacgcgggtgacattaggatgctgcccgcaaggcctctttactgattgccgcaccggctgggaaatagaccccgtcgcataaatgattatgataagatttatgcattcataacccgatccatctggaggaactatggatcatcgtctgcttgaaatcattgcctgcccggtttgcaacggaaaactttggtataaccaggaaaaacaagagcttatttgcaaactggacaacctcgctttcccgctgcgtgatggcattccagtgttgctggaaacggaagcccgcgtgctgactgctgatgagagtaaaagttgatgtaaactgctgatgagagtaaatcatgagttttgtggtcattattcccgcgcgctacgcgtccacgcgtctgcccggtaaaccattggttgatattaacggcaaacccatgattgttcatgttcttgaacgcgcgcgtgaaagtggtgccgagcgcatcatcgtggcaaccgatcatgaggatgttgcccgcgccgttgaagccgctggcggtgaagtatgtatgacgcgcgccgatcatcagagtggaacagaacgtctggcggaagttgtcgaaaaatgcgcattcagcgacgacacggtgatcgttaatgtgcagggtgatgaaccgatgatccctgcgacaatcattcgtcaggttgctgataacctcgctcagcgtcaggtgggtatggcgactctggcggtgccaatccacaatgcggaagaagcgtttaacccgaatgcggtgaaagtggttctcgacgctgaagggtatgcactgtacttctctcgcgccaccattccttgggatcgtgatcgttttgcagaaggccttgaaaccgttggcgataacttcctgcgtcatcttggtatttatggctaccgtgcaggctttatccgtcgttacgtcaactggcagccaagtccgttagaacacatcgaaatgttagagcagcttcgtgttctgtggtacggcgaaaaaatccatgttgctgttgctcaggaagttcctggcacaggtgtggatacccctgaagatcttgagcgcgttcgcgctgaaatgcgctaatttcacttcacgacacttcagccaattttgggaggagtgtcgtaccgttacgattttcctcaatttttcttttcaacaattgatctcattcaggtgacatcttttatattggcgctcattatgaaagcagtagcttttatgagggtaatctgaatggaacagctgcgtgccgaattaagccatttactgggcgaaaaactcagtcgtattgagtgcgtcaatgaaaaagcggatacggcgttgtgggctttgtatgacagccagggaaacccaatgccgttaatggcaagaagctttagtacgcccggaaaagcccgacaactggcatggaaaaccaccatgctggcaagaagtgggactgtccgtatgccgactatttatggtgtgatgacgcatgaagaacaccccggccccgatgtcctgctactggagcggatgcgtggtgttagcgtggaggcaccagcccgaacaccagaacgctgggaacaactcaaagaccaaatcgttgaagccttactggcctggcaccgtcaggacagtcgcggttgcgtcggcgcggtcgacaatactcaggaaaatttctggcccagttggtaccggcaacatgttgaagtgctatggaccacgctcaatcagttcaataacaccggtctgacgatgcaggataagcggatcctgtttcgcactcgcgaatgtctcccggcattatttgaaggctttaacgacaattgtgtgctgattcacggtaacttctgtttacgcagcatgttgaaagatagccgcagcgatcagttactggcgatggtcgggccgggactaatgctttgggcaccgcgagaatacgaactgttccgactaatggataattctctggcggaagatttgctctggagttacctgcaacgcgcgccagtggcggagagcttcatctggcggcgttggttgtatgtgttatgggatgaagttgcgcaactggttaataccggacgatttagtcggcgcaacttcgatctggcaagtaaaagtctcttgccgtggctcgcctgatcactcttgccgtggctcgccactgctaccttttagccactgccagatacggccaagcgtttcatagccaacacgatcgctatgcatcaaccagaccggagaagggattgcccgttcccacgggttaagcgggctgtcgatggccaactgattcgccggggctggtagcggatttaacccttcctgctgaaaaaagatcatcgcccgcggcagatgacttgcggaggtcaccagcaggaaaggggcgtcaccaatcgcctgtttcactgctgcagcttcttcttcggtatcttttggcaaatccagggtgataatttgctcgcgcggcacgcccaggctttgcgcaactctggcacctacttccgctgtactcaccgtattggtttttgctacgcctcccgtgaagatcagtttacttcccggattttcgcgccataagcgaataccttcattcaggcgtggcagactgttattgattaaattagagctcggtgcccactgcgggttccaggtataaccacctccgagcaccacgatatagtccactttttggctattattccatgtcggataggtgctttcgatgggacgcagcaggcggtcggctaccggttgcaaactcaataacaagagcgccagccacccaatgctaataaaaatcttcccggttttttgaaaacggctaaaccacagcagcgccaggccagcgccaataatcaacaacatcagcggaagtggcagcaacatattgccaatcacttttttcagtgtaaaaagcatcctttctggttccttttttaaccatatagcaagggatcgccagcgatattacaccagacgggttcattctcgccgtggctgtgacaaaatagcgtctttatcagaaaacgtcttagccaaccggtggagaaagcaatgcaggatcgcaattttgatgatattgcggaaaagttttcccgtaacatttacggcaccaccaaagggcagcttcgacaggctattctgtggcaggatctcgatcgcgtgctggcggaaatgggcccgcaaaaactgcgtgtgctggatgctggcggtggagaagggcagaccgcaatcaaaatggccgagcgtgggcatcaggtcattttatgcgatctttctgcgcagatgatcgaccgcgcaaaacaggcggcagaagcaaaaggtgtgagcgacaacatgcaatttatacattgcgccgctcaggatgttgctagccatttggaaacgcccgttgatctgatattgttccatgcggtgctcgagtgggtggctgatccccgcagcgtattgcagaccctctggagtgtgttgcgtccaggcggcgtgttgagcttaatgttctacaatgcgcatggtttgttgatgcataacatggtcgccgggaattttgattacgtgcaggcgggaatgccgaaaaagaaaaaacggacgcttagcccagattatccacgcgacccggcgcaggtttatctgtggctggaagaagctggttggcaaattatgggtaagacaggcgttcgcgtgtttcatgattatctgcgcgagaaacaccagcagcgcgactgctatgaagcattacttgaattagaaacgcgttattgccgtcaggaaccgtatattaccctggggcgttatattcatgtcaccgcgcgcaaaccgcagagcaaggataaagtatgagtgaattttcccagacagtccccgaactggttgcctgggccagaaaaaatgacttctccatcagcctgccggtagaccgactctcttttctgctggcggttgccacgctgaacggcgagcgtctggatggtgagatgagtgaaggcgagctggtggatgcattccgccatgtgagtgatgcgtttgagcaaaccagcgaaaccatcggcgtgcgcgccaataacgcgatcaacgacatggtgcgtcaacgtctgctgaaccgctttaccagcgagcaggcggaagggaacgcaatttaccgtctgacgccgctcggcatcggcattactgactactacatccgtcagcgcgagttttctacgctgcgtctttctatgcagttgagcattgtggcgggtgagctcaaacgcgcagcagatgccgccgaagagggcggtgatgaatttcactggcaccgtaatgtctatgcgccactgaaatatagcgtagcagaaattttcgacagtatcgacctgacgcaacgtctgatggacgaacagcagcagcaggtgaaggacgatatcgcccagttgctgaacaaagactggcgggcggcgatttccagctgtgaattgttgcttagcgaaacttccggaacgctgcgtgaattgcaggatacgctggaagcggcaggcgacaaattgcaggctaatctgttgcgcattcaggatgcgacgatgacccatgacgatctgcatttcgtcgatcgtctggtgttcgatctgcagagcaaactcgatcgtattatcagttggggccagcaatccatcgacttgtggattggctacgaccgccacgtacacaaatttattcgtaccgcgatcgatatggataaaaaccgcgtctttgctcagcggttacgtcagagcgtacaaacctattttgatgagccgtgggcgctaacttatgccaatgccgatcgtctgctggatatgcgtgacgaagagatggcactgcgcgatgaagaagtgactggggaacttcctgaggatctggaatacgaagagtttaacgagatccgcgaacagctggcggcgatcatcgaagaacaacttgccgtgtacaaaaccagacaagtgccgctggatcttggtctggtggtacgcgaatatctgagtcagtatccgcgtgcacgtcactttgacgttgcgcgtattgttattgatcaggcggtacgtcttggcgtagcgcaagcagatttcaccggactgccagcgaaatggcagccgattaatgattacggagccaaggtacaggcgcatgtcatcgacaaatattgaacaagtgatgccggttaagctggcgcaggcgctggcgaatccgttatttccggcgctggacagcgccttacgtagtggacgccatattggcctcgacgaactggataatcatgcattcctgatggattttcaggaatatctggaagagttttacgcgcgttataacgttgagcttattcgcgcaccagaagggttcttctatttacgcccacgttccaccacgctgatccctcgttccgtcttgagcgaactggatatgatggtcgggaaaatcctctgttatctctatctcagcccggaacggctggcgaatgaggggattttcacccagcaggaactgtacgacgaactgctcaccctggccgatgaagcaaaactgctgaaactggtgaacaaccgtagtaccggtagtgacgttgaccgtcagaagttgcaggagaaagtacgttctagcctcaaccgtctgcgtcgtttaggcatggtgtggtttatgggccacgacagcagcaagtttcgcattaccgaaagcgtgttccgcttcggagccgatgtgcgtgctggcgacgatccccgtgaagcacagcgtcgcctgattcgtgatggcgaagcaatgccgattgaaaatcatctgcaactcaacgatgaaaccgaagagaatcagccagatagcggagaggaagaataatgattgaacgcggtaaatttcgcagtctgacgctgattaactggaacggcttttttgcccgaacttttgaccttgacgagctggtcacgacgctttctggcggtaacggggcgggtaaatccaccaccatggcggcgttcgttacggcgctgatccccgacctgaccctgctgcatttccgtaacactacggaagccggggccaccagcggtagccgcgataaaggtctgcacggtaagctgaaagcgggtgtctgttatagcatgctcgacaccattaacagccgccaccagcgcgtggtggtcggtgtgcgtctgcaacaggttgccggacgcgatcgtaaagtggatatcaagccgtttgccattcagggactgccgatgagcgtgcagccgacacagctggtgaccgaaaccctgaacgaacgccaggcgcgcgtgctgccgcttaacgagctgaaagacaagctcgaggcgatggaaggcgtgcagtttaaacagttcaactccattactgattaccacagcctgatgttcgatctgggcatcatcgcgcgtcgtctgcgctccgcatctgaccgtagcaaattctatcgtctgatcgaagctagcctgtatggcgggatctccagtgccattacccgttctctgcgcgactacctgttgccagaaaacagcggcgtgcgtaaagcgttccaggacatggaagcggcgctgcgtgaaaaccgtatgacgctggaagcgattcgtgtcacccagagcgaccgcgacctgtttaagcatctgatcagcgaagccaccaactacgtggcggcggactacatgcgtcacgccaacgagcgccgtgtccatctcgacaaagccctggagtttcgtcgcgagctacatactagccgtcagcaactggcggctgagcagtacaaacacgtcgatatggcgcgtgagctggcagagcacaacggtgccgaaggcgatctggaagcggattatcaggcggccagtgatcacctgaacctggtgcaaaccgcactgcgtcagcaggagaagatcgaacgctacgaagcggatctcgatgagctgcagatccgtctggaagagcaaaatgaagtggtggcagaagccatcgaacgccagcaagagaatgaggctcgtgcggaagctgccgaactggaagtggacgagctgaaaagccagcttgctgactaccagcaggcgctggacgtccagcaaacgcgcgcgatccagtataaccaggcgattgctgcgcttaatcgtgccaaagaactgtgccatctgccggacttaaccgccgactgcgccgccgaatggctggaaaccttccaggcgaaagagctggaagcgactgaaaaaatgctctctcttgagcagaaaatgagcatggcgcaaaccgcgcacagccagtttgagcaggcttatcagctggtggtggcaatcaacggcccactggcgcgtaacgaggcgtgggatgtcgctcgcgaactattgcgcgaaggggtcgatcagcgtcacctggcagagcaggttcagccgctgcggatgcgattaagcgaactggaacagcgtctacgcgagcagcaagaagctgagcgtctgctggcagatttctgcaaacgtcagggcaagaattttgatatcgacgaactggaagccctgcatcaggaactggaagcacgcattgcctctctttccgatagcgtgtctaacgcccgtgaagagcgcatggcactgcgccaggagcaggaacagctgcagtctcgcattcagagtttgatgcagcgtgcgccggtttggctggcagcgcaaaacagtctcaaccagttgagcgaacagtgcggcgaagagtttacctccagccaggacgtcaccgaatatctgcaacagttgctggagcgtgagcgagaggcgattgttgaacgcgatgaagtgggcgcgcgcaaaaacgccgtcgatgaagagatcgaacgtttaagccagcctggcggctctgaagatcagcgtctgaacgcgctggcggagcgttttggtggtgtgctgctgagtgaaatttatgacgacgttagcctggaagatgcgccgtacttcagtgcgctgtatggcccgagtcgccacgccatcgtggtgccagatctgagtcaggtaactgaacacctggaaggcttgaccgattgcccggaagatctctatctgatcgaaggagatccgcagagtttcgatgacagcgtgttcagcgttgatgagctggaaaaagcggtagtggtgaaaatcgccgatcgtcagtggcgttatagtcgtttcccggaagtgccgctgtttggtcgtgctgcgcgtgaaagccgtattgaaagcctccatgccgagcgtgaagtgctttccgaacgcttcgccacgctctcctttgatgtacagaaaactcagcgtctgcatcaggcgttcagccgctttatcggcagtcatctggcggttgcgtttgagtctgacccggaagcagaaatccgtcaactgaacagccgtcgcgtcgaactggagcgggcgttaagtaatcatgaaaatgataaccagcagcagcgtattcagtttgagcaggcgaaagagggcgttacggcgctgaaccgcattctgccgcgtctcaacctgttggctgatgacagcctggcggatcgcgtcgatgaaatccgcgaacgtctggatgaagcccaggaagccgcgcgttttgttcagcagtttggcaatcaactggcgaaactggaaccgattgttagcgtattgcagagcgacccggaacagttcgaacagttaaaagaagattacgcgtactctcagcagatgcagcgcgatgcccgtcagcaggcgtttgccctgacggaagtggtgcagcgtcgtgcgcactttagctattctgacagcgcagaaatgcttagcggtaacagcgatctcaacgaaaaactgcgtgaacgtctggaacaggcggaagcggagcgtacccgcgctcgcgaagcgttgcgcggtcacgcagcgcagttgagtcagtacaaccaggtgctggctagcctgaaaagttcttacgacaccaaaaaagagctactcaacgatctgcaacgtgaattgcaggatatcggcgtgcgtgctgatagcggggcagaagagcgggcgcgtattcgccgtgacgagctgcatgcgcaactgagcaataaccgtagtcgccgcaatcaactggaaaaagcgcttaccttctgcgaagcggagatggacaacctgacccgcaaactgcgcaagctggagcgggattactttgagatgcgcgagcaggtagtgaccgccaaagcgggctggtgtgcggtgatgcgcatggtgaaagataacggcgttgagcgccgcttacaccgtcgtgagctggcttatctctccgctgatgatttgcgttccatgagcgataaggcgttaggtgcgctgcgtctggcggtggcggataacgaacatctgcgcgacgtgctgcgcatgagcgaagatccgaaacgtccggagcgtaaaattcagttcttcgtggcggtttatcagcatctgcgtgaacgtattcgtcaggatattattcgtaccgatgatccggtggaagctatcgaacagatggagattgaacttagccgtctgaccgaagaattaacctcccgtgaacagaaactggcgatcagttcccgcagcgtggcgaacatcattcgcaaaaccattcagcgcgagcagaaccgtatccgtatgctcaaccaggggttgcagaacgtaagctttggtcaggtgaacagcgtgcgtctcaacgtgaacgtgcgtgaaacgcacgccatgctactggatgtgctctctgaacagcacgagcagcatcaggatctgtttaacagcaaccgtttgaccttcagcgaagcgctggcgaaactgtatcaacgtcttaacccgcagattgatatggggcagcgcacgccgcagaccatcggtgaagaactgctggattaccgcaactatctggaaatggaagttgaggttaaccgtggttccgatggctggctgcgcgcagagtctggtgcattgagcaccggtgaggcgattggtaccggtatgagcattctggtgatggtggtacaaagctgggaagatgaatctcgccgcctgcgcggtaaagatatctctccttgccgcctgctgttcctcgatgaagcagcgcgactggatgctcgttctatcgccacgctgtttgaattgtgtgagcgtttgcaaatgcaactcatcatcgcagcgccggaaaatatcagcccggagaaaggcaccacctataaactggtgcgtaaagtcttccagaataccgaacacgttcatgtcgtcggcctgcgaggatttgcgccgcaactccctgaaacgcttccaggaactgacgaagcgccttctcaggcgagttaaaattaaggcggcagcaatgccgccttttctttttccgaaaactccgtttctgcactaaaaaagtggcacattacggcgcgcttttctttaaacttctttacattaggttatgtaaaaacgtatcggcgtttatatactgaagataagcctgatgagtaacaggcttgctcgtcatactttcgtgagtattggcgttgtacaggcaagtcgtaaaataacagcctggctattcagagtatgataaaaacagggggcaagggatgttgcttaatatgatgtgtggtcgtcagctgagcgcaatcagtttgtgcctggccgtaacattcgctccactgttcaatgcgcaggccgatgagcctgaagtaatccctggcgacagcccggtggctgtcagtgaacagggcgaggcactgccgcaggcgcaagccacggcaataatggcggggatccagccattgcctgaaggtgcggcagaaaaagcccgcacgcaaatcgaatctcaattacccgcaggttacaagccggtttatcttaaccagcttcaactgttgtatgccgcacgcgatatgcaacccatgtgggaaaaccgtgatgctgttaaagccttccagcaacagctggcagaggtggcgattgccggtttccagccgcagtttaataaatgggtagagttactgaccgatcctggtgttaacgggatggcacgcgacgtggtgctctctgatgcgatgatgggctatctccatttcattgcaaatattccggtcaaaggcactcgctggctatatagcagtaaaccttatgcacttgcaacgccgccgctcagcgtgattaaccaatggcagctggcgctggataaaggtcaattgcctacgtttgttgcaggactggcaccgcagcatccgcaatatgcggcgatgcatgaaagcttactggccttactctgtgacaccaaaccgtggccccaactgaccggcaaagcaacgttgcgcccagggcagtggagtaacgacgtaccggcgttgcgcgaaatattgcaacgcacaggcatgttggacggggggccgaaaattactctacctggcgatgacacgccaactgacgcggtagtcagcccatccgctgttactgttgaaacagcagaaactaagccgatggataagcaaacgacgtctcgtagtaaacctgcgcctgccgttcgcgccgcctacgataatgaactggtggaagccgttaaacgttttcaggcatggcaaggattgggggcagatggtgctattggcccggcaacacgtgactggttaaacgtaacgcccgcccagcgtgctggtgtgttggctctcaacatccagcgattgcgcttgctgccaacagagctttctaccgggatcatggttaacattccggcctatagcctggtctactatcagaacggcaatcaggtgctggatagccgagtcattgtcggtcgccccgatcgcaaaacgccgatgatgagcagtgcccttaacaacgtagtggtaaacccgccgtggaacgtacctccaactctggcacgcaaagatattctgccaaaagtgcgcaacgatccgggatatctcgaaagccatggctatacggtgatgcgcggctggaacagcagagaagcgattgacccatggcaggttgactggtctacaatcacggccagcaatttaccgttccgcttccagcaggctccaggcccacggaacagcctggggcgctataaattcaatatgccgagtagtgaggccatttatttgcatgacacgccgaaccacaatctgttcaagcgtgatacacgcgcattgagcagtggctgtgtacgagtgaataaagcttccgatctggcgaatatgctgttgcaggatgcaggctggaatgacaaacgtatttctgatgcgctgaagcagggtgatacacgttacgtcaatattcggcagagcattccggtgaatctctactacctgacggcctttgttggtgcagatggtcgtacccagtatcgtacagatatttacaattatgatctgcctgcgcgatccagcagccaaatcgtaagcaaagcggaacaattaatcaggtaaatgaagtagttcggggaaatcagttgtcgtaataattagcatgattgggggcgattctctgcagcccccgtcactgctggggttgagtcatcttgacgtctgctttacgggcggttaaggtgcctcttgtgcgccagaagtgcatataaacgataacattgacctgtagacttgattatcatggacaaattcgacgctaatcgccgcaaattgctggcgcttggtggcgttgcactcggtgccgccatcctgccgacccctgcgtttgcaacactctctaccccacgcccgcgcattttgacactcaataatcttcataccggagagagtatcaaagcggagtttttcgatggcagaggctatattcaggaagaattggcaaaacttaaccattttttccgcgattaccgcgcgaacaaaataaagtccatcgacccaggattattcgaccagttgtatcgcctgcaagggttgttaggcacgcgcaaaccggtgcaactcatttccggttatcgttctattgataccaacaatgaactacgcgcccgcagccgtggagtagcgaagaaaagctatcacactaaaggccaggcgatggatttccatattgaaggtatcgcgttaagcaatattcgcaaagccgcgttatctatgcgcgcaggtggtgtaggatattatccacgtagtaactttgtgcatattgataccgggccagcacggcactggtaataattgcttaacgaaacaggggcagtatgaactatcgtattattccggtcaccgcattctcccagaactgtagtttaatctggtgtgaacaaacccgtctggccgcactggtcgatcctggcggcgatgcggaaaaaatcaaacaggaagttgatgacagcggcctgacactgatgcagatcctgctgacgcatggtcatctggaccacgttggcgcagcggcggaactggcgcaacattacggcgtgccggttttcggcccggaaaaagaagatgagttctggctgcaaggcttgcctgcgcaaagtcgtatgtttggtctggaagagtgccagccgctgacgccagatcgttggctgaacgaaggcgataccatcagcatagggaatgtgactttacaggtgttacattgccctgggcatacgccgggtcatgtcgtgttttttgatgatcgggcaaagctgctgatttctggcgatgttattttcaaaggcggagtagggcgcagtgacttcccgcgtggcgatcataatcaactgatttctagtatcaaagataaattgctgccactgggggatgacgtgatatttattccgggtcacggaccattatccacacttggttatgaacgcctgcataatcccttcctgcaagacgaaatgcccgtctggtaaggcacataaaaaagcccgcttttaatgctggcctggatttctggcaaagtgcgctttgtttatgccggatgcggcacgagcgccttatccggcctacaaaatcgtgcaaattcaaaatattgcaggggacgcgtaggcctgataagcgtagcgcatcaggcaatgttgcgtttgtcatcagtctcagcccgcttttcagcgggcttcattgtttttaatgcttacagcactgccacaatcgcttcgcacagcggagccatgttatctggtgtcatcccggccacatttacgcgaccagaagcaaccgcatatacgccaaactcttcgcgcagacgcagcacttgttcttttgtcaggccactgaaggagaacatgccgttctgtttgatgataaagctgaagtcgcggtttgcgcctttttcctgcagcgtattgacgaacaactgacgcatacgctgaatacgctggcgcatatcagtcagctcttgttcccaaatcgcacgtaacgcatcgttgctcaggatggtggcaacaacagaagcgccgtgtgctggtgggttagagtagttagcgcgaatcgccgctttcatttggctgaatgcgcgatcaacggtttcactgtcggcagcaaccagagtacaagcgccaacacgctcgttgtacaggccaaagtttttagagtaggaactggcaacaatcagctctttatgcatagccgcgaaagcgcgcagtccttcagcatcttcttccagaccacgggcaaaaccctggtaagcgaagtcaaacagcggtaaccagcctttctcaacggagagttgtgccagtgtttgccattgttccagcgtagggtcgataccggttgggttatggcagcagccatggaacagcactacgtcgccagcctgagcttcattcaggctgttaatcagtgcatcgaagtcaagagtgtgattttccgcatcataataagcgtattcacgaacttccagacctgcagagttaaagacgctcttatggttcggccagcttgggttgctcacccacacacgcttaacgctggtattttttgccaggaaatcggcagccacgcgtagtgcgccagtgccccccggagtctgtgccgtgcgagcacgtttgtcattgatcagggcgctacctttaccaaacagcagttcctgagtgcagcgaccaaattcagggatgccgtcaatgccgaggtaatttttggtggtttcattttcgagcagatactgttcagcctttttcacgctggtcagtaccggggttttgcccgtctcatctttatagacaccaatcccgaggttaattttgccgggacgttcatcggcacgaaacagatcggccaggcccagaatcgggtcggcaggagcggcggtaatgttctcaaacatgacgaggttccattatggttacagaagggaagtccgctatcagggtaacgggagatttacaaaattccaactattactgatgaaaacgcaggctgtttttgcaagacgtgagattgctctggaaggtataaaaaaaacaggaccaaagtcctgttttttcggcatttaacaaagaggtgtgctattagaactggtaaacgatacccacagcaacggtgtcgtcactacctacgcccagtttgttgtcagaatcgatctggttgatgatgtagtcaacataggtggacatgtttttgttgaagtagtaggttgcgcccacttcaaagtagttcaccagatcaacatcaccgataccttctacgtctttcgctttagatttggtgtaagcgatggacggacgcagaccgaaatcgaactggtattgcgcaactaacagaacgtcttgcgttttgttggcgaagccgctggtgtttgtaaatttattagtgatcggcgtagcgttacgggtttcaccgtagttcgctgccaggtagatgttgttcgcgtcgtacttcagaccagtagcccactgttcagcttttttaccgttgccaagaggttgagcttcttgcaggttggtacggtcagctgcaccataagcaccaacgataccaaagccttcgtattcgtagctgatagaaccgccaacaccgtcgccgttagaacggcgtgcagtgtcacgctcgtttttacccaggtactgaacagcgaagttcaggccatcaaccagaccaaagaagttggagttacgataggtagcaacgccgccaacacgaccaacgaagaagtcatcgctgtatgcagtatcaccaccaaattctggcagcatatcggtgtaacccagtgcatcataaaccacaccgtagttacggccgtaatcgaaagaaccaacgtcagcgtatttaagacccgcgaatgccagacgcgttttgttaccagtttgagcgtcagcgccttcagagttgttaccctggaagttatattcccactgaccataaccggtcagatcggaattgatttgagtttcccctttaaaaccaagacgggcataggtcatgtcgccattgccaccgtaactgttttcaccgttacccttggaaaaataatgcagaccaacagctttaccgtacagatctactttgttgccatctttgttatagatttctgcagcgtttgcagtacctgctactaacagagcagggacgatcactgccagaatattgcgcttcatcattatttattaccctcatggttttttttatgacacctgccactgccgtcaataagttctgtcaataaaaatttacggaactattgatgagagtttggtgtctttatgtgtctgcaggcatctttccattcaaactaacgtttcgctaccgtgaaagtgctacaaagataaagatttggtttcaaaaagaaaaaatatgtaaccaaaagtaaaatttaaggaactttgtgaacaccgtcatatttccatagagacgtgatgatatttacagcaattttaatctatttatatgatttccttatatttaaattaactaaacggaaattttgtttctgatggaaactttatcgacctggcacaaaatcttctttcagacatccagaatgccaaaaaatagtatgaaaattgtgctattagctaagaaaaaactaatccgcaataagaatgcggattagtttttgcgcgtaaatgttgcaatgtaatattccgtaacaggatgatcgttatggcggggttgcaaatagattgcttgacttaacaaacagataacttgacagaaaagataaaaaaagagccagcgggcgctggctcttgaagacgctaaattagaagctggcgttacgcggagtacgtgggaacggaatcacatcacgtacgttttgcacgccagttacgtaagcaatcagacgttcaaaaccaagaccgaaaccactatgcggaacagtaccgtagcgacgcagatcgcgataccaccagtaatcttctttattcaggcccatttccagcatacgctcgtccagcacgtccagacgttcttcacgctgggagccaccaatgatctcaccgatgcccggagccagaacgtccatagccgcaacggttttaccgtcttcgttaaggcgcatatagaacgctttaatatctttcggatagtttttaaccactaccggtgctttaaagtgttcttccgccagataacgctcatgctcagaagagagatcgactccccagtaaaccgggttttcaaacttcctgccgcagttttcgagaatggtcactgcgtcggtataatccacctgcgcaaaatcggcttcaatgaagcgttccagacgactaacggcatctttatctacgcgttcagcgaagaatttcatgtcgtcagcgcgttcttcgagaaccgctttgaagacatatttcagcatggcttcagccagacccgcaatatcgttcaggttagcaaacgccacttccggctccagcatccagaattccgccaggtgacggctggtgttggagttttcagcacggaaagtcgggccgaaggtataaattttggacaatgcgcaagcgtaggtttcgccgttcaactggccagatacggtcaggaaagactctttaccaaagaagtctttgtcgaaatccactttgccctgatcgttacgcggcaggttttccagatccagcgtagaaacgcggaacatttcgcctgcaccttcggtatcagatgcggtaatcagactcgtactaacccagaagaatccctgctcgttaaagaagcgatgcagcgcctgcgccagcgtatggcgaacgcgcgcgacggcaccaatcaggtttgtgcgcggacgcaggtgagcgacttcacgcagatactcaatgctgtggcgttttgccgccatcgggtaagtgtctggatcttcaacccaaccagcaacttcaaccttgctggcctgaatttcaaattgttgcccctggcccgggctcgccacgactttacccgtcacaatgacgctgcagccggtggtcagacgcaggacgtcttcattgtaattgggcagagaattattgatgacagcctgtacaggatcaaagcaggaaccgtcataaacggcgaggaaggagatgccagctttactatctcggcgggtacgtacccatccgcgcacggtgacttcgctgtcaacggctacacggccctggagtacgtcggctacaggcacaacgctcataatattctctctgttaatagtcggaaaaaataaacacttgtccacccgtaaatggggggatacctatgttacctggcatctgcaatcagacaagcagaattcgcaaatgcagcgaaagatttcggaattaaaggtaaaaaaagggagccgattagctccctgatgatattaactggcttttttaatatgcggaaggtcgaacgctttgcgcagcgcccgaacaaacgctttatcatggcagatagttttgccagggctgtcagaaagtttcgccaccggtttaccgttacactctaccaacttaatgacaatattcaggggttttacctgggggatatcgcaggtcaggcgagtcccaataccaaaacttaattgcacgcgggaagagaagtggcggtatagctcaaccgctttgcgtaaatccagattgtcagagaaaaccagcgttttactctgtggatcaattcccagcttttcataatgtgcaatggctttttcaccccattcaaccgggtcgccagagtcatgacgcaggccctgataccgactagcgaactcgacaccgaaatcacgcaggaaagcatccatagtgatgcagtcggttaatgcaatgccaagttggtcgggatactcttccagccaggcagcaagtgcagctcgctggctgttggctagatccgggctgatttgctgatgtgcctggaaccattcgtgtgcctgtgttcccatcggcgtgagggaaagccgacgcgccagatcgtagttgctggtgcccacaaaccaggattcctgttgcagacgcttaacgatggtttcttgtacttcgcgagaaaaacggcgacgggtgccaaaatccatcagatggaagcggctcatatcaagaccggcggttaacgcgctgaagtcgactaatttgctttccagcgtgtcgagggcttgcgcaacgtcggcctgcggactgcgatagcgatgtaccatttcactgataaccgccagcaaaggaacttcccagaggatgacttcacgccacgggccgcttaaacgaatatccagcttgccattatcgttggacacggtgacttgttccgggttaaagcggaactcgcgtaaccagttaagatagtcggccttaaagaaaggcagggcagaaagccactgatattcatcatcctgcaggcgcaggtgctgcatcgcctgaacctgttcacgaatagcatcggcataaatacccagcagatcgtcacctcggcaacgaaactccgccgcgacatgcacatcgtaatagtgatgaaacacggcttgctgcatatgcaacttataagcatctgtatccagcaagctgtgcagaacaggagaagcgaattgtgtcataggtgcgcagtagcgtcctcgtacaggagcgtttagtacaataaacatcttcaggaactgctggagtataccttgtttcgcaatttattgaaccccgatcacaccatatgccacctttctggtcgatggcattacgcggtgtatgttataaaaatgtagcaataaaggcgtttgtacctgaaaagatgaagattctgcatagcgcgatttacgcaacaggaatagactgaacaccagactctataaaagatgctaaaggttatttatgactcaacagccacaagccaaataccgtcacgattatcgtgcgccggattaccagattactgatattgacttgacctttgacctcgacgcgcaaaagacggtcgttaccgcggtcagccaggctgtccgtcatggtgcaagtgatgctccccttcgtctcaacggcgaagacctcaaactggtttctgttcatattaatgatgagccgtggaccgcctggaaagaagaagagggcgcactggttatcagtaatttgccggagcgttttacgcttaagatcattaatgaaataagcccggcggcgaataccgcgctggaagggctttatcagagtggcgatgcgctttgcacccagtgtgaagccgaaggtttccgccatattacgtattatctcgaccgcccggacgtgctggcgcgttttaccaccaaaattattgccgataaaatcaaatatcccttcctgctttccaatggtaaccgcgttgcgcaaggcgaactggaaaacggacgccattgggtacagtggcaggacccgttcccgaaaccgtgctacctgtttgcgctggtggcaggcgactttgatgtactgcgcgatacctttaccacgcgttctggtcgcgaagtagcactggagctgtacgtcgatcgcggcaaccttgatcgcgcgccgtgggcgatgaccagcctgaaaaactccatgaaatgggatgaagaacgctttggcctggagtatgacctcgacatctatatgatcgtcgcggtggatttcttcaatatgggcgcaatggagaataaggggctgaatatctttaactccaaatatgtgctggcccgcaccgacaccgccaccgacaaagattacctcgatattgaacgcgttatcggccatgaatatttccataactggaccggtaaccgagtgacctgtcgcgactggttccagctcagcctgaaagaaggtttaaccgtcttccgcgatcaggagttcagctctgaccttggttcccgcgcagttaaccgcatcaataatgtacgcaccatgcgcggattgcagtttgcagaagacgccagcccgatggcgcacccgatccgcccggatatggtcattgagatgaacaacttctacaccctgaccgtttacgagaagggcgcggaagtgattcgcatgatccacaccctgcttggcgaagaaaacttccagaaagggatgcagctttatttcgagcgtcatgatggtagtgcagcgacctgtgacgactttgtgcaggcgatggaagatgcgagcaatgtcgatctctcccatttccgccgttggtacagccagtccggtacaccgattgtgaccgtcaaagacgactacaatccggaaaccgagcagtacaccctgaccatcagccagcgcacgccagccacgccggatcaggcagaaaaacagccgctgcatattccgtttgccatcgaactgtatgataacgaaggcaaagtgatcccgttgcagaaaggcggtcatccggtgaattccgtgctgaacgtcactcaggcggaacagacctttgtctttgataatgtctacttccagccggtgcctgcgctgctgtgcgaattctctgcgccagtgaaactggaatataagtggagcgatcagcaactgaccttcctgatgcgtcatgcgcgtaatgatttctcccgctgggatgcggcgcaaagtttgctggcaacctacatcaagctgaacgtcgcgcgtcatcagcaaggtcagccgctgtctctgccggtgcatgtggctgatgctttccgcgcggtactgcttgatgagaagattgatccagcgctggcggcagaaatcctgacgctgccttctgtcaatgaaatggctgaattgttcgatatcatcgacccgattgctattgccgaagtacgcgaagcactcactcgtactctggcgactgaactggcggatgagctactggctatttacaacgcgaattaccagagcgagtaccgtgttgagcatgaagatattgcaaaacgcactctgcgtaatgcctgcctgcgtttcctcgcttttggtgaaacgcatctggctgatgtgctggtgagcaagcagttccacgaagcaaacaatatgactgatgcgctggcggcgctttctgcggcggttgccgcacagctgccttgccgtgacgcgctgatgcaggagtacgacgacaagtggcatcagaacggtctggtgatggataaatggtttatcctgcaagccaccagcccggcggcgaatgtgctggagacggtgcgcggcctgttgcagcatcgcagttttaccatgagcaacccgaaccgtattcgtagcttgattggcgcgtttgcgggcagcaatccggcagcgttccatgccgaagatggcagcggttacctgttcctggtggaaatgcttaccgacctcaacagccgtaacccgcaggtggctagtcgtctgattgaaccgctgattcgcctgaaacgttacgatgccaaacgtcaggagaaaatgcgcgcggcgctggaacagttgaaagggctggaaaatctctctggcgatctgtacgagaagataactaaagcactggcttgataaataaccgaatggcggcaatagcgccgccattcggggaatttacccctgttttctcaggcgagtttcagattcaccacgttgcatcacccgttgcaacacctccgcttccagctccgctaatcgcacgctccctaatcgacgcggacgggggatatccactgtcaaatccagaccaatttttccctcttcaattaacagcacccggtcagccatcgctaccgcttcgctcacatcatgcgtcaccaacagtacggtaaagccgtgctcctgccaaagactcacaatcaaatcctgcatctcgagtcgcgttaaggcgtccagcgccccgagcggttcatcaagcaacaataatcccggtcgatgaatcaacgctcttgccagcgccactcgctgtttctgcccgccagaaagtgcggcaggccattcccctgcgcgattctccagtcctaccgcagccaacgctcgacgtgcggcatcgcgccactggcctttaaggcctaacccaacgttatcaatcacgcttttccacggtagcagacgcgcatcctgaaacatcattcgcgtgtcttcctgaatttcagccagcggtgtggtgcccgctaacacatcgcctgcggttggcgtttccagacctgccagcaggcgcagcagggtacttttgccaccaccgctgcggcccaccaccgccacaaactgacctgccggaatatgtaaatccagttggttcaggacgatattttccgcgtaatgtttgcttactgcattgagcaacaatggcgtgccctggttcagacgagcagtattcataccgtggcctccttcaaatgataagccgggttccagcgcaaccagaggcgctctaacagctgcgcgctgacgtcagccagtttgccgagcagggcgtaaagaataatagcgactaccaccacgtccgtttgcaaaaacccccgcgcattcatcgccagataaccaatgccactattggcagaaatggtttcggcaacaatcagcgtcagccacatcaggcccaacgcaaaacgcacgccgaccataatactgggcagggcaccaggcaggatcacatggataaacagcggtatgccggataatccatagctacgcgccatctccaccaacccgcgatcgatattacggatgccatgccaggtgttgatataaatggggaatagcgtaccgagcgccaccagaaagatttttgcggattcatcaatgccaaaccacaaaatcaccagcgggatcagcgccagatgcggcacgttgcgcaacatctgaatactggtatccagcagccgttctccccagcgagatagcccgctaatcagtcccaaaatcaaccccaggcttccgccaatactaaagccaatcagcgcccgccaggagctgatcgccagatgctgccacagttcgccgctggcggagagcgtccagaacgccgtcaccactccttccggactaggcaaaatacgcgtgctcagccagccaacgctggaggccagttgccacaccgccacgatgcccaccggtaaaaaccagggggcaacgcgcaataaccacttcttcactggcgttgccattatttcttccttagctttgcgcgactttacgggggataaaatcattcgccaccgcttcgccttgcggattcagcggctgcggctggggaatttccgggatggcgacatccagaagcgggaacagcaactcgccaacccgatacgcttcttccagatgcggatagccgctaagcacaaaactgtcgatgccaagcgcggcatattcgttgattcgcgcagcgaccgtaggaccatcgcccaccagcgccgtcccggcaccgccgcgcactaagccaacgcccgcccataaattggggctgatctccagattgtcgcgcttgccgttatgtaacgccgccattcgctgttgccctacggaatccgtccgggcgaatgcggcctgtgctttggcgatagtttcatcatcaagatggctgattaaccgctcggcggcctgccacgcttcgtcgttagtttcacgaacaatcacatgcagacgaataccgaaacgaattttgcgtccatgcgcggcagctttcgcccgcacttgttcgattttctctttaaccagttccggcggttcgccccaggtgaggtagagatcaacctgttctgccgccagctcctgggcgacatcactgcttccgccaaagtaaagtggcggatacggctgttgaatcgccgggaagagcagttttgctccgcgcacatgaatatgtttaccgttgaaatcgacggtttctctctgcaataaacgccgccagacctgggtaaattccgcgctggcttcgtagcgctcgctatgatcaaggaacactccgtcgcctgccagctcttgtggatcgctgcctgtgaccaggttaaacaacgcacgtccattactgagacggtcaagcgtggcggcctggcgggcggcaacggtaggactggttacgctgggacgcagggcgacaagaaacttcagccgctgcgtcaccgggatcatgcttgcggcaaccagccacgcatcttcgcaggagcgccccgttggaattagcacaccggtatagccaagacgatccgccgcttgcgcaatttgttgcagataaccgtgatcaaccgggcgactaccttcttccgttcccagataatgcccgtcaccgtgggtcggtaaaaaccagaacatattcagactcataattgttttccttccagttgagtgggctgccagatgcgctggcgaatatcgacttttttcggcaccagacgattttcataaaacagatctgccgtttgctgctgtaaggcggcaacctcggcgttaaccggtttgatggtggtaggagggcgatgatctaagtaagaggcaatcaccggtgccggtaagcccatcgtttttgccagtaaagcgatgctttgctcgcgctggctgcgggttaacgcatcggcctcactaaaggttgccagtacgccctgaataaaagcgccgtttttttctgcatagggacgagctgccagataaaagcttccagtttgattgagatcggtgccgtctttcagcacccgcacgccgccctgtaataatgcagcagagtagtagggatcccagatagcccaggcgtcaacgttaccttgctggaacgcggcgcgggcatcagcgggcgtcaggtaagtgggttggatatcggtaaacttaagtccggcctgacgcagtgcacgcagtaaaaggttgtgactactggaacctttctgaaaggcaactttgtgacctttaagatcggctacggttttgatcgggctgttttctgccaccagaatcacttcggctttgggcttcggtggctcgacgcccacgtacaccaaatcagccccggcagcctgggcaaagattggcggaatatccccggtactgccgagatcaatactgccaacgtttaacgcttccaacatttgcggacccgcggggaactccacccaggagattttactttccggatagcgtttttccagtaactggtggctttttgccagcaccataccaatactgcctttctgatagcctatacgtaacgcttcagggctggattctgcagcaaccgcaaaagtagagacgctaagcaatcccgccagcgccagtttaatgatgttacgcatgggcattacctcgcagagacagaaggtcaggaacctgaacatcgcggcggtgcaatgcctgccagaaagtttctagcgcggtatcaagacgggtttgcagatttggcgtgaactggggtctgtgatggtaatcaattacttgactgtcatcggcaaacacgccgtgcaggatctcctgagctttcagtgcgcttaaaactggtttaagggcataatcgaccgccagcagatgggccacggtaccgcccgtcgccagcggtagcaccactttgccttgcaaagcgcgttctggcagcaggtcgagcagggttttcaacgcaccggaataggcggctttatacacaggcgtggcgacaatcagcccatcggcctgttgcagctgttcggtgaaggtcttgagtgccggactatcgaaacgagcataaagtagatcttccggggcgaagttttgcagattccagtgataaacctctacatccaggccatttagtttttcccgcgcatattccagcaaggagctggagcgagaaggaaagcgaggactacccgccagggtgatgacacgcatactctctccttataaccaattgttctttttttgttaacattgataacaattcggtcagtctgtcggagagacaagaaaattccaaatataaattttgtgtatctttttctgaaaataaactaaagaaagggctttatatatcacgcatatttatttattggatagtcattagatgttgaatcaatgaattactcgttcagttaatatttaaatattcatgaaatctataaattaaagatttgtcacttattggatttagtatgcttgatttaaatggcggacaattattgttattattaagtctaatgtcatttaaaggcattatcatatttacgaagagatcaggatgataacgatgaaaaaaagtgtattgacggcgtttataactgtggtatgtgcaacgtccagcgttatggctgctgatgataatgctatcacggatggcagtgtaacatttaatggtaaagttattgctccagcttgtaccctggtagctgcgacgaaagattccgtggtgactttgccagatgttagtgccacgaagttgcaaaccaatggtcaggtttctggcgtgcaaattgatgtgccaattgaattaaaagattgtgatactaccgtaacaaaaaatgcaacgttcacctttaatggcactgcggatactactcagattacagcgtttgctaaccaggccagttctgatgctgctacaaacgtggccctgcaaatgtatatgaatgatggtacaacggccatcacgccagacacagaaaccgggaacattttgttgcaggatggagatcagacgttgacttttaaagttgattatatcgctacggggaaagcgactagtggtaatgtgaatgcggtaacaaatttccatattaactattattaatagaactcattaattgttttattaattagtacccctccagtgttctggaggggatattcatattttttaagagtgactatttatgaaaacttgcataacaaagggaattgtgaccgtaagtttaacggcaatattactcagctgcagttccgcatgggcggcaggtaaaggcgggattggacttgcagcaacacgtcttgtttatagtgaaggtgaagagcaaattagtctgggtgtacgtaacaccagtccggatgttccttatcttattcagagttgggtgatgaccccagataataaaaaaagtgcagactttattattacaccaccgctatttgtgctgaatccggcaaatgagaatctgttacgcattatgtacattggagcgccgttggcgaaagacagagaaacccttttcttcactagcgtacgggcagtccctagtacaacgaagcggaaagagggaaataccctgaagattgccacacaaagcgtcatcaaacttttctggcgaccaaaaggtttagcgtatcccttaggcgaggctccggcgaaactgcgttgcactagcagtgctgacatggttacggtcagtaacccaacaccttatttcattaccctgacagacctgaaaataggtggaaaagtagttaaaaatcaaatgatttccccctttgataaataccaattttctctgccaaagggggccaaaaatagcagcgtaacgtatcgaaccatcaatgactacggggcggaaacgccgcaactcaactgtaaaagctaagccgtcttcagttaagagagcgagatgtatagaactcatcgacaacacagcctgttaagctctggtggagtgccaagctttattggtgggctggtggtgtttgtgagcgcagcgttcaatgcacaagctgaaacctggttcgatcctgcttttttcaaagatgatcccagtatggtggccgatttgtctcgtttcgaaaaaggacaaaaaataacgccaggggtttatcgtgtcgatattgttctgaatcagacaattgtagatacgcgcaacgtcaattttgttgagataacgccagagaaggggattgccgcctgtttgacgactgaaagcctggatgcaatgggtgttaatactgatgcgtttccggcttttaaacaactggacaaacaagcgtgtgtgccattggcggagattattccggatgccagcgtaacgtttaatgtgaataaactccgtctggaaattagtgtaccgcaaatcgccatcaaaagtaatgcccgtggttatgtcccccctgaacgttgggatgaagggatcaacgcgctattactgggatatagctttagcggggctaacagtattcatagcagcgcagacagtgattctggcgacagctattttctgaatttaaacagtggcgttaatttaggcccatggagattgcgcaacaatagtacatggagtcgtagtagtggccaaaccgcagaatggaagaatctcagcagctatttgcaacgggcggttattcctctgaaaggcgaactgaccgtaggtgatgattatactgcaggcgattttttcgatagtgtcagctttcgtggtgtgcagctggcgagtgatgacaacatgctgccagacagcctgaaagggtttgcgcctgtggtgcgtggtatcgccaaaagcaatgcccagataacgattaagcaaaatggttacaccatttaccaaacttatgtaagccctggtgcttttgaaattagtgatctctattccacgagcagcagcggtgatttgttagttgaaatcaaagaagcggacggcagcgtcaatagctacagcgtaccgttctccagtgtgccattactccagcgtcaggggcgaatcaaatacgcggtgacactggcgaaatacagaaccaatagtaatgaacagcaggagagcaaatttgcccaggccacgttgcagtggggcggaccgtggggaacgacctggtatggtggtggacaatatgctgaatattaccgtgccgccatgtttggtctgggatttaacctcggcgatttcggagcaattagcttcgatgcgacccaggcgaagagtacgctagcagatcaaagcgaacataaaggtcagagttatcgttttctgtatgccaaaacgctcaaccacttgggcactaactttcaattgatgggctatcgctatagcacgagcggtttctacaccctttccgacaccatgtataaacatatggatggctacgaatttaatgacggtgatgatgaagatacgccgatgtggagccgttattacaatttgttttacaccaaacgtggcaaactgcaggtcaatatctcccagcaattaggcgagtacggtagcttttatttaagtggtagccagcaaacttactggcatacggatcaacaggatcggctattacagtttggctacaacacgcaaattaaagatcttagcctggggatttcctggaactacagtaagtcccgtggtcaacctgatgctgatcaggtgtttgctctaaatttttccctgccgctcaatctgttgctccccagaagtaatgatagctataccaggaaaaaaaattacgcctggatgacctctaacaccagtatcgataacgaagggcacactacacaaaacctgggtttaacggagacattactcgatgacggtaacctgagctacagcgtgcaacagggatataacagcgaggggaaaacggctaatggtagcgccagcatggattacaaaggggcgtttgcggatgcccgagtgggctacaactacagcgataacggcagtcaacaacaactgaactacgctcttagtggcagtttagttgcccatagtcagggcattaccctggggcaaagcctgggggaaactaacgttctgattgcagcaccaggcgcagagaatactcgtgtggcgaacagcaccgggctgaaaactgactggcgcggatataccgttgttccttatgccacttcttatcgggaaaatcgaatcgcacttgatgcggcgagcttaaaacgtaacgtggatcttgaaaatgcagtagtcaacgtggttcccaccaaaggggcgttggttctggcggagttcaatgcccatgcgggtgcaagggtattaatgaaaacaagtaagcagggtataccgctgcgttttggcgcgatagcgacgctggacggcgtacaggctaatagcggcataattgatgatgatggcagcctctatatggcgggtttaccggcgaagggaacaataagcgtgcgctggggcgaagctcccgatcaaatttgtcatatcaattacgagcttaccgaacaacaaattaactctgcgattacgcgaatggatgccatatgcagataatctttggagaaaaatgcgtgagtttactacgactattttttgccgccgtcttaatgttatggtgcgctcaaaccgctgcttatagcgggcagtgtcatactactcaggggaatccgtatattggcgtcaattttggcgttaaaaccctggaggaagaagcaaatacggcaggggtagttaaagacaaattttatcagtggaacgaaagcaatgattattatgtttcctgtgattgcgataaagacaatgtcagaagtggccgatgggcattcgccgcggatagtccgttagtctatttaggcgacaactggtacaaaattaatgactatcttgccgccaaagttttattgcaggttaaaggcagttctcctactgcggttcctttcgaaaacgtgggcacagggggggatacccgatggcatatttgcgaccctggcggtcaacgtttaggtgggcagggggcaagcggtaatagcggtagcttttccctgaaaatattgcagccgttcgttggcagcgtcgtcattcctcctatggcgctggcgcgattatatgaatgctacaacatacccgcaggtgattcctgcacgactacaggtacaccggttttagtgtattacctgtctggtacgatcaatagtcttggcagttgttccgtcaatgccggagagacaattgaagttgatttaggtgatgtcttcgctgccaatttccgtgttgtagggcataaacctcttggggccagaacggcagaacttgcaattccagtcaggtgtaacacgggaaacgcgggattagttaatgtcaacctgagtctgacggcaaccacagaccccagctatccccaggcgattaagacgagtcgtcctggcgtgggcgtggtggtgaccgatagccagaacaacattatttcccctgctggtggaacattaccgctctctattcctgatgatgcagacagtatcgcgcgaatgaatgtctatccagtcagcacgacaggtgtaccaccagaaaccgggcgatttgaagccacggcaacggtgagaataaattttgattaacgcgtgaacgtatgaagaaaaaaacgatatttcagtgcgttatcttgttctttagcattcttaacatccatgtcgggatggctgggcctgaacaagttagtatgcatatttatgggaatgtggtcgatcagggctgtgatgtcgccaccaaaagtgcattacaaaatattcatattggtgattttaatatcagtgattttcaggccgcgaataccgtaagcactgctgctgatttgaatatcgatatcaccggttgtgccgctggtattactggcgcggacgtcctttttagcggcgaggctgacacccttgcgccgacactgctcaaactaactgacacaggcggaagcggtggtatggcaacggggattgccgtgcaaattcttgatgcgcaaagtcagcaagaaatcccgctcaatcaggtccagcctcttacgcccttaaaagccggggataacacactcaaatatcaacttcgttataagtccacaaaggcgggagcaacgggcggtaatgcgacggcggttctctattttgatctggtttaccagtgaaggagtgatgttgaaacggataatctggattctgttcttattgggattaacgtggggctgtgagctatttgcccatgatggcacggtcaacattagcggaagctttcgccgtaatacatgcgtgctggcacaggatagcaagcaaatcaatgtgcagttaggcgatgtcagcctgacacgtttttctcatgggaattatggcccggagaaatctttcatcattaatttgcaggattgcggaacagatgtcagcacggttgacgtcacctttagtggaacccccgacggagtgcagagcgaaatgttgtccattgaaagtggtacggatgcagccagcgggctggcaattgcgattctggatgatgcgaagatattgattccgcttaaccaggcgagtaaagactacagcctacatagcggtaaggtgccattaactttttatgcgcaattgcgacctgtcaatagcgatgtgcagagcggtaaagtgaatgccagcgcgacatttgtacttcattatgactaatacgtggaacagattggcgctcttgattttcgccgttttaagcctgctggtggcgggtgaattgcaggcaggagtggtggtcggcggaacgcgatttatctttccggcagacagagaaagcatatctattttactgactaataccagtcaggaatcctggcttattaacagtaaaatcaaccgcccaacgcgttgggccgggggggaagcgagcacagtgccagcaccattactggccgctccgccacttattctcctgaagcccggtacgacaggcacgttgcgcttgctgagaacggaaagcgacatcttgcctgtggatcgcgaaacgctatttgagttaagcattgccagcgtgccatccggcaaagttgaaaatcagagcgtaaaagtggcgatgcgcagcgtatttaaactgttctggcgacccgaaggtttgccgggcgacccgctggaagcttatcaacaattacgctggacacggaatagccagggtgtacaactcactaacccaacgccttattacattaacctgattcaggtgagtgtaaatggtaaagcgttaagtaatgtgggagttgtgccgcctaaaagccagcgtcagacaagctggtgtcaggcaatcgcaccgtgtcatgtcgcctggcgggcgataaatgattacggcgggttgagtgcaaagaaggagcaaaatctgccctgaaacaggttcggaaaacgtttgcgttttttttgccgcaggtcaattcccttttggtccgaactcgcacataatacgcccccggtttgcacaccgggaatccaggagagttcatgtactaccccttcgttcgtaaagcccttttccagctcgatccagagcgcgctcatgagtttacttttcagcaattacgccgtattacaggaacgccgtttgaagcactggtgcggcagaaagtgcctgcgaaacctgttaactgcatgggcctgacgtttaaaaatccgcttggtctggcagccggtcttgataaagacggggagtgcattgacgcgttaggcgcgatgggatttggaagcatcgagatcggtaccgtcacgccacgtccacagccaggtaatgacaagccgcgtctctttcgtctggtagatgccgaaggtttgatcaaccgtatgggctttaataatcttggcgttgataacctcgtagagaacgtaaaaaaggcccattatgacggcgtcctgggtattaacatcggcaaaaataaagatacgccagtggagcagggcaaagatgactatctgatttgtatggaaaaaatctatgcctatgcgggatatatcgccatcaatattagtagcccgaataccccaggattacgcacgctgcaatatggtgaagcgctggatgatctcttaaccgcgattaaaaataagcaaaatgatttgcaagcgatgcaccataaatatgtgccgatcgcagtgaagatcgcgccggatctttctgaagaagaattgatccaggttgccgatagtttagttcgccataatattgatggcgttattgcaaccaataccacactcgatcgttctcttgttcagggaatgaaaaattgcgatcaaaccggtggcttaagtggtcgtccgcttcagttaaaaagcaccgaaattattcgccgcttgagtctggaattaaacggtcgcttaccgatcatcggtgttggcggcatcgacagcgttatcgctgcgcgtgaaaagattgctgcgggtgccagtctggtgcaaatttattctggttttatttttaaaggtccgccgctgattaaagaaatcgttacccatatctaattatttcttcgaattcctctttataagataatcagggctttattttcagccctggttgttttatattcatcgctgttgcttatttagacattttgtacttttattgttgaggttattaagcgaagcgacaatggattgtgttgctgcggttttatagggtaggggagaggcagatgcgaattaaaccagacgataactggcgttggtattacgatgaagagcacgatcgaatgatgctcgatttagccaatggtatgctatttcgcagtcgttttgcgcgcaagatgttgactccagatgccttttctcccgcaggcttttgcgttgacgacgccgcgctctatttctcttttgaagaaaagtgccgcgattttaatttatctaaagaacaaaaagccgaactggtgctgaatgcactggtagcaattcgctatctcaaaccgcaaatgccgaaaagctggcattttgtttcccatggtgaaatgtgggtgcccatgccgggcgatgcggcctgcgtttggttgagcgatactcacgagcaggtcaatttgctggtcgttgaatctggcgaaaatgccgcactatgcctgctggcacaaccctgcgttgttattgcgggtcgcgcgatgcagttgggcgacgccattaaaatcatgaacgacaggctgaaaccgcaggttaatgttgacagcttcagcctcgaacaggcagtttaacgcgccaacttaagtgcagtcttcggtacacagctacagcaaagaatggtgccatcatcgcccattgcactttttttcagcggcgtgacttcgccttctaaaagctgaacacggcaacttccacaaatgcccgcgcggcaagaataagggatacgaattccctgattttctaattgctccagcaacacctgttggttatttccacgaaatgcctgtccctgccagtcaatatctacatttgcgtccggttgttgcgtgatgttggcggtatcatcagcggcagctgcgccgtaaatttttgccggagccgttgccagaatttccacctcatcgccaacgcgaatcacgccgctattacgggcaattaaattctgaccaaaatcgacatcgccgttatcctgggcagtgcggaaagattgcaatgtttttaatggttcgcctgccggatgtttttgccctttttctgggctgacggtggtgaaaatacagcggctacaaggtttaaccacatcaaacaccacatcaccaatgcgaatcactttccagcgatcttcttcccaggcactcgcgccggaaaccaccagattggggcggaattgctccatttttacactggccggacaacgttgttggagatcacgtaagctggcttcgttagcaagaaggtaaggatagccatcagcaaaactcagaggtacagtgttgtggcgtttcacgcgccgggtcatttgtggccccacccagcgtaattgcacttcgcgggagaaaaatccacttagccatttgttgatcgcgtctggcgcaattcgcgcggtaaaatgtgtgccccaaacttcggttggtgcgtcttgtgtggcgaaatcagcaaaacgaacatatgcgctactgccatctggtgcggtgagatgcaagccatcatgcacaggactaggagtaaaccgtaccatctggggaaactggcgagcggtaataaacgtaccgtcaggttccgtgatcataaagatgcgatcgaaggccagaccactgacatctgccagagcatgtgtaagaccaatgccgcgcatgcttttaacaggatgaataaaaagccggattaatgtcgccacggtgcggtcctcaaatgaaaataagccctcaactttatgacatgacgcgcttattagctataatgcgcaacaattttcttagcgcctgtcccattaggctattttatttgtcagtttggccctgggttatgctcgaaatcctcacgtacttgtgtacgctccggtttctccgcgctgtccatgtccagactgactgcaacaattacgcctactgcggtaggctcttagagtaaaagtgacgatatgaattctctgtttgccagtacggcccgtgggctggaagagctgttaaaaactgaactggaaaacctgggggccgttgaatgccaggtggttcagggtggggtccatttcaagggcgacacacggcttgtttaccagagcctgatgtggagccgcctggccagccgtattatgttgccgctgggcgagtgtaaggtttacagcgatttagacctctatctcggtgttcaggcgatcaactggacagagatgtttaatcctggcgcgaccttcgctgtccacttcagtggtttgaatgacaccatccgcaacagtcagtacggcgcgatgaaagtgaaagacgcgatcgtcgatgctttcacgcggaaaaatctgccgcgtccaaatgttgatcgcgatgcgccggatatccgcgttaacgtctggctgcataaagaaaccgccagtatcgctcttgatctgagtggtgatggtttacatctgcgtggctatcgcgatcgtgctggtattgcgccgatcaaagaaaccctggcagccgctattgtgatgcgatccggctggcagccaggaacaccgctgctcgatccgatgtgtggttccggtacgttgctgattgaagcagcgatgctggcgaccgatcgcgcaccaggcttgcaccgtgggcgttggggctttagcggctgggcgcagcatgatgaagctatctggcaggaagtgaaagcggaagcgcaaactcgcgcccgtaaaggcctggctgagtatagctctcatttttacggtagcgacagcgacgcacgggtgattcaacgtgcacgcactaacgcccgtcttgcggggattggtgaactgatcacctttgaggtgaaagatgtcgcgcaactgaccaatccgctgccgaaagggccgtacggcacagtgttgagcaacccgccatacggggaacgtctggacagcgaaccggcgctgattgcgctgcatagcctgctgggtcggatcatgaaaaaccagtttggtggctggaatctctctttgtttagtgccagcccggatctgctaagctgcttgcagctgcgtgcagacaaacagtacaaggcgaaaaacggcccgctggactgcgtacagaaaaattaccacgttgccgaaagcactccagacagcaaaccggcgatggtagcggaagactacaccaaccgcctgcgtaagaacctcaaaaaattcgagaagtgggctcgccaggaagggattgaatgttaccgcctgtatgacgccgatctgccagaatataacgttgccgttgaccgttatgccgactgggtggtggtgcaggagtatgcgccgccaaaaactattgatgctcacaaagcgcgtcagcgtctgttcgatattatcgctgcaaccattagcgtactggggattgcgccaaacaaactggtgctgaaaacccgtgaacgccagaagggcaaaaaccaataccagaaactgggcgagaagggcgagtttcttgaagttaccgaatataacgctcacttgtgggtgaacctgacggattatctcgatactggtctgttcctcgatcaccgcatcgcccgtcgtatgctcggtcagatgagcaaaggcaaagatttcctcaacctgttctcttataccggcagcgccaccgtgcatgcgggattaggcggtgcacgcagcaccaccaccgtggatatgagccgtacttatctggaatgggcagaacgcaacctgcgtctgaatggcctgaccgggcgtgcgcatcgcctgattcaggccgattgcctggcgtggctgcgtgaggcaaatgaacagttcgatctgatctttatcgatccgccaaccttctctaacagtaaacgaatggaagatgcgtttgatgttcagcgcgatcatctggcgctgatgaaagatttgaaacgtctgctgcgtgcaggtgggacgatcatgttcagcaacaacaaacgtggcttccgtatggatctcgacggcctggcaaaactgggactgaaagcacaagaaattacgcaaaaaacgctctcccaggatttcgcccgtaaccgccagatccacaactgctggctgattaccgcagcctgaaaggaatagtaatgagtttaatcagtatgcatggcgcatggctgagcttcagcgacgcgccgcttctcgataacgcagaactgcatatcgaagataacgaacgtgtttgtctggtgggccgcaacggcgcaggcaaaagcacgttaatgaaaatcctcaaccgtgaacaagggctggatgacggtcgcattatttacgagcaagatttgattgtagcgcgtctgcaacaggatccgccgcgtaacgttgagggtagcgtttatgatttcgttgccgaaggcattgaagaacaagcggaatatctgaaacgctatcacgatattagccgcctggtgatgaacgacccgagcgagaaaaatctcaacgaactggcgaaggttcaggaacagctggatcaccacaacctgtggcagctggaaaaccgcatcaacgaagtgctggcgcaactggggttagatcctaacgttgcgctgagcagcctttccggcggctggttgcgtaaagcggcattaggacgcgcgctggtgagtaatccgcgcgtgctgttgcttgatgaaccgacaaaccacctggatattgaaaccatcgactggctggaagggtttttgaaaactttcaacgggacgattattttcatctcccacgaccgtagctttatccgcaatatggcgacgcgcattgttgatctcgatcgcggcaagctggtgacctatccagggaattacgaccagtacctgctggaaaaagaagaagccctgcgcgtggaagaattacaaaatgccgagttcgatcgcaaactggcgcaggaagaggtgtggatccgccaggggatcaaagcacgccgtacccgtaatgaaggccgcgtacgcgccctgaaagcgatgcgtcgcgaacgtggtgaacgtcgcgaagtgatgggtaccgcaaagatgcaggtggaagaggccagccgctccggtaaaatcgttttcgaaatggaagacgtttgctaccaggttaacggtaagcaactggtgaaagatttttctgcccaggttctacgtggcgacaaaattgccctgattggtccgaatgggtgcggcaaaaccacgctgctaaaactgatgctcggtcagcttcaagcggacagcgggcgtattcacgttggcaccaaactggaagtggcttatttcgatcagcaccgcgcggaactggatcccgataaaacggtgatggataaccttgccgaaggtaagcaagaggtgatggttaacggcaagccacgccacgtattgggctatttgcaggactttctgttccatccgaaacgggcgatgacgccggtacgtgcgctttctggcggtgagcggaaccgcttgctgctggcgcgtttgttcctcaaaccaagcaacttattgattcttgacgaaccgaccaacgatcttgatgtcgaaacgctggaactgctggaagaactgatcgacagctatcagggcacggtattgctggttagccacgatcgtcagtttgtcgataacaccgttacagaatgttggatcttcgaaggcggcggtaaaattggtcgttatgtcggcggttatcatgatgcccgtggtcagcaagagcagtatgtggcgctcaaacagcctgcggtgaaaaaaaccgaagaagccgccgcggcaaaagcagaaactgtaaaacgcagcagtagcaaactaagctataaattgcagcgcgaactggagcagctaccgcaattgctcgaagatctggaggcgaagctggaagccctacagacgcaagtggcggatgcttccttcttcagtcagccgcatgagcagacgcaaaaagtgcttgctgatatggctgctgcagagcaggagctggagcaagcctttgaacgctgggagtatcttgaagcgttaaaaaatggtggctgatcgcaaaatagtcgatttaaacagagacagctgacaacggtaaaattgcctgatgaactgggtttatcaggcatgaaaaccaacactttgttagtcatctgtaaaatagcgcatcattaaggagtaccaatgtgcgaacatcatcatgccgcgaagcacatcctgtgcagccagtgtgacatgctggtggcgttaccgcgccttgagcatggtcagaaagcggcatgtccccggtgtggcacaacgttaaccgtggcgtgggatgcccctcggcagcgtcccaccgcctatgcgttggctgcactgttcatgctgttgctgtccaacttgtttccttttgtgaatatgaacgttgcaggagttaccagtgaaattacattactggaaattcccggcgtgcttttttctgaggactacgccagcctcggcacctttttcctgttgtttgtgcaactggttcccgcgttttgtctgataaccattctgttactggtgaatcgcgcggaattaccggtccgtttaaaagagcaactggcacgggtgctttttcaactcaaaacctggggaatggcggagattttcctcgcgggtgtgctggtcagtttcgttaaactgatggcttacggcagcattggggtaggcagcagctttctcccctggtgtttattttgtgtcctgcaactgcgcgcttttcagtgcgttgatcgtcgctggttatgggacgacatcgccccgatgccagaactgcgccagccgctaaaaccaggcgtcacggggatacgtcaggggctgcgtagctgctcctgttgtacggcaatccttcctgctgatgaacccgtgtgcccgcgttgtagtaccaaagggtacgttcggcgtagaaacagcctgcagtggacactcgcgctgcttgtaacgtccatcatgctgtatcttccggctaatattttgcccatcatggtgacggatttattaggcagcaagatgccgagcacgattctcgctggggtcattctgttatggagcgaaggctcttatcccgtcgctgcggtgatctttctggccagtattatggtgccaacgttaaagatgatcgccatcgcgtggctgtgttgggatgccaaagggcatggcaagcgcgacagtgaaagaatgcatttgatttatgaagttgttgagtttgtaggccgctggagcatgattgacgttttcgttatcgcggtgctcagcgcgctggtgcgtatgggaggtttaatgagtatttatccggcaatgggtgcattaatgtttgctttagtcgtcataatgacaatgttttctgctatgacgtttgacccgcgtttgagctgggatcgtcaacctgaaagtgagcatgaggagtcctgacagtatggaatctaataatggggaagccaaaatccagaaagtgaagaactggtctcccgtgtggatatttcctatcgtcacggcgctcattggggcctgggttcttttttatcattacagccatcagggaccggaagtgaccctgatcaccgcgaatgcggaaggaattgaaggtggcaaaaccaccattaaaagccgtagcgttgacgtcggcgtggttgaaagcgccacactggctgatgatttgacgcacgttgaaatcaaagcgcggctgaattccggtatggaaaaattgctgcataaagacaccgtcttttgggtggtgaaaccgcagattggtcgcgaagggattagcggcctgggaacgctgctgtctggagtttatatcgaactgcagccaggcgcgaaaggcagcaaaatggataaatacgatttgctggacagcccaccgttggccccgcctgatgcgaaaggtatccgtgtgattctcgatagcaaaaaagccgggcagctcagcccaggagatccggtgctgttccgtggctatcgggtaggtagcgttgaaaccagcaccttcgatacacaaaaacgcaatatcagctatcaactgttcatcaatgcaccttatgaccgactggtgaccaacaatgttcgcttctggaaagatagtggcattgcggttgatctgacgagtgcagggatgcgtgtggagatgggcagtttgacaacgctgctgagtggcggtgtcagctttgatgtgccggaaggtctggatttagggcagccagtggcaccgaaaacagctttcgttttgtatgatgatcagaagagcattcaggatagcttgtacaccgatcacattgattatctgatgttctttaaagatagcgtacgcggtctgcaaccgggagctccggtagagttccggggtattcgcctgggtaccgtaagcaaagtgccattctttgcgccgaatatgcgtcagacatttaacgatgattaccgtattccggtactgattcgtatcgagccagagcggctgaaaatgcagcttggcgaaaatgcggatgttgttgagcaccttggcgaattgttgaaacgtggtttacgcggaagcctgaaaaccggaaacctggtcactggtgcactgtatgttgatctcgatttctatccaaatacgcctgcaataaccggtattcgtgaatttaatggttatcagattatcccgaccgttagcggcggcctggcgcaaatccagcaacgactgatggaagcgttggataagatcaacaaactgccattgaatccgatgattgaacaggcaaccagtacgctttctgaaagtcagcgcacaatgaaaaacctgcaaacgacgctggatagcatgaacaagatcctcgctagccagagcatgcagcagttgccgacggatatgcagagtacgttgcgtgaattgaatcgcagcatgcagggcttccagcctggctccgcagcctacaacaagatggtggcggatatgcagcgccttgatcaggtgttgcgagaactgcaaccggtgctgaaaacgttcaatgagaagagtaacgcgctggtatttgaagcgaaggacaaaaaagatccagagccgaagagggcgaaacaatgaaaaagtggctagtgacgattgcagcactgtggctggccggatgcagctccggcgaaattaataaaaactattaccagttacctgtggtgcagagcggtacacaaagtaccgccagccagggcaatcgtctgttatgggtagagcaggtcactgttcctgactatctggcggggaatggtgtggtttatcaaaccagtgatgtgaagtatgtgattgccaacaacaacttgtgggccagcccgttggatcaacagttgcgcaacaccctggttgccaacctgagtacgcaactgcccggctgggtggttgcctcccagcctctgggaagcgcccaggacacgctcaatgttaccgtaacggagtttaacggtcgctatgatggcaaggtcattgtcagtggtgagtggctgttgaaccaccagggacaactgatcaaacgtccgttccgtctggaaggagtgcaaactcaggatggttacgatgagatggttaaagtgctggccggtgtctggagtcaggaagccgcttctattgcacaagagataaagcgtctaccttaattataaagatttgtaaatataaccgtctccggtatgttgcctgaggcggtttttttgtctctaacgtgcggaaaaatttgttcctcttcacattttttgtacaaccgacatgcccgtgtagctcacaaatatgacagtggcgtgaattttgcgcattgacggcagttatgattcgcggtattgcttaactgtgattgcacatttagtaatcactgttttcttttccaccagaaaccagtatgagggaaacgaggcatgaagagacaaaaacgagatcgcctggaacgggcacatcaacgtggttatcaggccggcatcgccggacgcagtaaagaaatgtgtccctatcagacgctgaatcaaaggagtcaatggctgggaggctggcgagaagccatggcggacagggtagtaatggcctgattctgtctctttaaaaagaaacctccgcattgcggaggtttcgccttttgatactctgtctgattataatcagaaggcagacgtatcctggaacagaccgactttcaggtcgctggcggtatagatcagacgaccatcaaccagcacttcgccatccgccaggcccataatcagacgacggttaacaatgcgtttaaagtgaatacggtaggtcacttttttcgctgtcggcagtacctgaccagtgaatttcacttcgccaacgcccagcgcgcggcctttaccttcgccgcccagccagccgaggtagaaccctaccagctgccacattgcgtccaggcccaggcatcccggcataaccggatcgccaataaagtggcatccgaagaaccacagatccggattgatatccagttctgcttcaacataccctttgtcgaagttaccacccgtttcggtcattttgaccacacggtccatcatcagcatgttcggtgctggcaattgcgggcctttagcgccaaacagttcaccgcgaccagaggcaagaaggtcttcttttgtataggattcgcgtttatctaccatgttctctgtaagccttattttattgaagcacgcaggatagctaacacgtgtacgctgaacaagtccgatcagttcggaataaaccagttcagccaacgtaatggccatggaaaacggtgacgtccttcctgttggcttgcttgcgcgatacgttcctggatggtttgcatcagcgtcgtttggccttcgccatcccacaccagatttaataataacggcagtgcgtcagtcacatcgtctactgcccagatggtgaatttgccttcttctaccgctttcaccagttcactgtgaagacttaaatggcgaacgttagctgtggggataatgacaccttgtttcccggttaactcacgttgctggcaaatagcaaagaagccttcgattttctcatttaaaccaccgaccggctgggcgcgaccgaactgatcgacactacctgtgatagcgatactctgattcaccggcacatcggcgagggcgcttatcagggcgcagagttcagccatgctggcactatctccatcaacttcactgtaactctgctcaaatgtcaggcttgcactgaaggggatctgttgctcaagctgtagttcgctcatcaggaacgcttgcatgatcatcatccctttcgcatggatattgccgccaagctccgctttgcgttcgatgtcggtgaattcaccatcgccaatatgcacaacgcagctaatgcgagaaggttcgccaaaagcgcgtggatgacccggaaattcaatgacgctaagggcgttaatttgcccgatgcgttcgccttcggtttcaatcaggatttgctcctgaaggatctcatcctgcatacgttcagcgaggaaaccttcgcgccattcacgctgctgcagcattaagtttagctgctcgccggagaaggtgtcgccatcacacagggaggcgacctctttacactggcggaggatccactgcgggctaagcggaagtgtttcttgttcaccggtgtagcgtgctgcttcgcggataagtatcggccaggcatccgctcccggtgcaggtaagtgattatgtctggcggtaaatgtcacccagcgacaccactgggttacactctccgcatcgacaatctgcagagtatcttcaaattcgctataaatagcctgctcactaagctctggctccatctcctggaaatcagccaaactttcgcgttcgcctaccagaatgactttcagcttcaatggcatgctaggcacagagacggggagagggcggctctcatcaaacgcaacccagtcaaaacgctcgcggttaacgatatttttcagccgcatccacagcagaggttgcgccagcagtgtacgcaaagagataatgagaataccgccatttgcctgatgcaccagaccaggctgcagggtaatgtcgccattaaactggcgcaggcagccaaagagttgctccgcttctacccagtcggcagcgacaacttgcgttaaagtcgcaaaattatcatctgcactcactgcgtgacgtaagcggatggagtggccggaaacctcatagtgaccgcccaccagttggcctgcatcgctttgtagcgtacgcgcggcattggcaataagattcagatactcagactcttccggggccttcgccagcataaaagaggaggatgctcgcgtatgcagcaactgctccagcgcaaattgcagccgcggttgagtatcactgaataaaggatcgttttcgtcaatcaaatgtggctgagcaaatatttcctgatagctatcggtatcaggaaccaggtcacgccatgcaagtttcgtaatggtcaaagttgatgttttttagtctgttgtcaaagccgcgattataccgtaaccggcactacagcacacgtagaaagcaccgacaatactcctggcatgggcgttaaagctcacaggatggagattcttttcttcactggcctaaaaagctgatattctgtaaagagttacacggtaacattgagatcgctatgaaatatcaacaacttgaaaatcttgaaagcggttggaaatggaagtatctggttaagaagcatcgcgaaggggagttaatcacccgttacatagaagccagtgccgcccaggaagccgtcgatgtgttgctcagcctggaaaatgaacccgtgctggtaaatggctggattgacaagcatatgaatccggaactggtcaatcgcatgaagcaaaccattcgggcaagacgaaagcgccattttaatgcggaacaccagcatacgcgcaaaaaaagcatcgatctggaatttattgtctggcaacgtctggctggtcttgcgcagcgtcgcggtaaaacgctttctgaaacgattgttcagctgattgaagatgcggaaaacaaagagaaatacgcgaataaaatgtcttctctgaagcaggatctgcaggcattgctgggtaaggaataactgacgaaagtcagttcaatttactaaaggcaaaaaaaaccccgcagcagcggggtttttctaccagacgagaacttaagcctgcggctgagttacaacgtctttgatacctttaacttcgatctctacgcgacgatccggagccaggcagtcgatcagtgcagcacgctgtttcacgttgtcacaggtgttgccagtaaccgggttggattcgcccataccacgtgcggagatcttgtctgccgggatacctttggagatcaggtaatcaacaacagactgagcacggcgctcggacagaccctggttgtaagcgtcagaaccgatgcggtcggtgtaacccagaacaactacggaaccgtctttcggatccaggttgctcagctggctgtacagctgatccagagcagcctgaccttccggtttcagggttgctttgttgaagttgaacagaacgtcagacttcagagtgaagtgcttggtctgtacttccggtgccggagctggagccggagcaactactggagctgcttcgccctgaccgaaacggtaggaaacacccaggctcagcatgccgttgtccggacgagtgccgatggtgtgtgcgtcaccgatgttgttggtccactggtattccagacgggtagcgatttcaggagtgatcgcgtactcaacaccgccagcgaagaccggagaaacgccggtgtcgtggtttttaccataaacgttggatttagtgtctgcacgccataccatgccacccagacgagtgtagatgtccaggtcgtcagtgattgggtaacccagtttagcggtcagttgaacgccctgagctttgtatgcaccgttttcaacgctgcctttgtacggcatacgacctaaccagtcgtaacccatttcaaagccaacatacgggttaacctggtaaccaccaaaagcaccagcgcccagttggttttcatgggtcgggccattgttgttgatgaaaccagtgtcatggtactgggaccagcccagtttagcaccagtgtaccaggtgttatctttcggagcggcctgcgctacggtagcgaaaccagccagtgccactgcaatcgcgatagctgtctttttcattttttgcgcctcgttatcatccaaaatacgccatgaatatctccaacgagataacacggttaaatccttcaccgggggatctgctcaatattaactctaccgatatcttcggcttatgccgagcacccctggcgatgtaaagtctacaacgtagttgaaaacttacaagtgtgaactccgtcaggcatatgaaaaaaaagtcttgtataaggtatgtttaatcttttttgtcagcgacaatttacagaagagaatcgcggaaaccgcttcagacaagcctccgcaaggaaaattagtcacgactgaaagcattggctgggcgacaaaaaaagttccaggattaatcctaaatttacttaatgatacaaattagagtgaatttttagcccggaaagttgtctcgtggcgtgagaggatgcgcttaccggacgcataataaaccccatagcgttaccttcatttgccgcatcaacaagttcagcatgctcttcttcagtcaaatcatctgccaaccaaccgatcaccacactgtaattgcccgtgcgtaaagcgcgaaccatactctccacagtgtggcaaggggagagctggctaatctgcattactttcgttaagggtagcccagatgcctgaacccattcccgactcagtttttgttgcggtgttaaccagagttgccagcggctttgctgaccgagttgctgtaacaatggcaacagtagaagttgcgtcatcatgggctgatcttcgcgatagacaacttcactgataagcccggctgtagtgttttccgtagagacacgcgcaattttacttgctgcggaactgaagctgctagaacgatgtgcatagccactagtgtacataatcaatccagcccctgtgagttactgtatggatgtacagtacatccagtgacaacaaagatcaaccctattttcggaaagagcctcgcaaattttgtcgttggtgacgggaaaacataaattaatcttgccccttaagaataagttgcctattttcgtagttaacggatccgttaatgtgaatcattcttttatgttatgattttaaaaggaattttatgaaaagcctctcctataagcggatctataaaagtcaagaatacctggcaacgttgggcacaattgaataccgaagtttgtttggcagttacagcctgaccgttgacgacacggtgtttgcgatggtttctgatggtgagttgtatcttcgggcttgtgagcaaagtgcacagtactgtgtaaaacatccgcctgtctggctgacatataaaaagtgtggccgatccgttaccctcaattactatcgggttgatgaaagtctatggcgaaatcaactgaagctggtgcgtctgagcaaatattctctcgatgcagcgctgaaagagaaaagcacgcgcaatacccgggaaagactgaaagatttgcccaatatgtcttttcatctggaagcgattctcggggaggtggggattaaggatgtacgggcgttacgtatacttggggcaaaaatgtgttggttgcgactgcggcagcaaaacagtctggtgacagaaaagattctgtttatgcttgaaggtgccattatcggcattcatgaagctgcgctcccggtggcacgccgccaggagcttgcagaatgggctgactctcttacgccgaaacaggagtttcctgcggaacttgagtaattacgcgctaacaggagtttcctgcggaacttgagtaatctggcgttgcagacgaccaatctcaggcagtaatgcaatcaataatccaacttgttgtacgaccagaggttctttgctgtctgcccgtggttcaagttgctgcatccgctgtttcaggctagctaatgcctcattgacgcgttcttcatcagcaggttgatgatgtaacgcgtcatcaacatagcaaactgcgtcatcaagaaacgccagaatttcaggattagttaactgctcccggtgagcaccgagggcactgatatagctggtaaacgtatggttaaggcacagcaaccgaaacgcggcttcgcgaatttgcggggtaacgttcggctcgctggacatattacttaccacgctcgccagctcagcatcacggttgtgtgcatcgcggcgggcaatacgatacgccagacggttatcacgcccctgatggtattgctccagtatggcatcgagataccgacagttggcctctgtggcacgttcgagcatgcgcggcagattgcgaaactgccagtcaggccagatgtagctcactgccgcccacgcaatggcacaaccaatcagcgtatcgattacgcgaggtaacgctacttcaaaaccttcacccagtaagttaaaacacagtagcaccaaaagtgtgatgaacatcgttgcatgagcgtattgcacgttacggaaggcaaaaaagagcacgccggtaataaccagcagcaccagctgcccttccagacttggcacaaaccacagcacaggaatgccaatggcgatacctaccagcgtaccaataatccttaacttcaggcggtggcgcgtggcgttatagtttggctggcagacaaacaaacttgtcagcaagatccaatacccgtgatgcattccggttatctgaatgatggcgtagccgaagcacaacaccaggctcattcttaccgcatgacggaagagggcggattccggcgtgaagtgacggctaagacgcagccagatatcactcaacccgtgcgggctgtcatcagcgagctcattttcgtcattattatggggtagtgcctgggcctgttcactttcaattgttgccagttgggcatcaatggcgcgtaaattgttcagcaaaaatcccagtgttttgagtaaatcggcgggtgcgccgttatcgcgcatccgctccagcgcagcatcaatatgcgtaaaagcgcgctcaaaatgcggatcatgttgataaggctgacgcaacaaaatacagcgactcagttgctggcacgcctggccctgcatgctcatcagccgctgaaaacggaacagcacgtcgctgtggcgaaaatgttcacgcaatgtttgatactgaatatgagaagagctggcacgctcgtgaatatcctgtgcgacaaagtaataatgcagcgtgcgacgcgttccccgttgaccacgatcgccacgtaagcgggtcagcaggctgagtttcgtctgattcaatgtcgccatcagcagaccgttggcgagagccaaatcgtacagcggtgcctggctttgatcttcaatatcaggatcaaacatgcggctcttgagctcaagataacgcgccagttgttcatagcaacgcgccaggttgtcctgcagcgggcggaccgggaacagcagatgaccaataagtgtcaggacgttgtaccagacggcaccggccagcagatacatcggctgctgataccagtgctcatacagacttgttcccaacatagtgtaaatggcgatcagcaatgcaccgaaggcaattgttgcatagcgttgacccagaccgccgagcaaaatgaagccgctggtagagagcgttaagccaatcgcaaatagccagggccagggaaacagcaattctacactggcgctggcgataaaaaagcagaacagcgtaatgatgaggttacgcaaacgtcccgccagtcggtcatcgagatcggtcagcgccgctgccaccatccccagcgttagcggaatcgtcagttttacatcacccagccaccacggaaacgctgtggttccacaaagcgcaataaaaatacgcgcgtaatacagccaggcgctgttccaggtatagcgtttgagcaaaggacttagcataaaggccatattagtggattattcaaaacgacgacgtgcattggcttcacgcgcagcttgcgctgtttctacgcttaccacgcgacgaccaaccggccatagtgcaatagcggcaattttaaagttcgcaatgccgacaggaatgccaatgatactaatacattgtgcgatgcccgttgcaatgtgcatcaggcataaccaccagccaaagaaaatcagccagaaaatattcaataccgtaccgccagtattcagcagcacatttttgccagccgggttcagttcatcgacatgaatagcttcattgccataaggcaccagagacagtttagtgatctcccagcaggatcgtgtcagcggtaaggtaaaaatcagcacaatactgaccagagtcgccaacagccagcccagagtggtggcaaatccgccaagcacaaagttcagaatgttcaaaacggtacgcataaaacctcgctttactgtggttttcagtaatgggcggcaattgtaacgtttttttgggctggagcacgttttctctgacggttacactgataagaaataatttcgtgtggatctacagagtcatggaactgaaagcgacaacgcttggaaaacgtctggcacagcacccttacgatcgggcggtgatcctcaatgccgggattaaagtctccggcgatcgccacgaataccttattcctttcaatcaattactggcgattcactgtaagcgcggtctggtatggggcgagctggaatttgtactgccggacgaaaaagtggtgcgtctgcacggcaccgaatggggcgagacgcagcgtttttaccatcatcttgatgctcactggcggcggtggagtggcgagatgagcgaaattgcgtctggtgttttacgccagcaactggatttgattgccacgcgcactggggaaaataaatggctgacgcgtgagcaaacctctggcgtgcagcaacaaatccgccaggctttgagcgcgttgccgttgccggttaaccgactggaagaattcgataactgccgtgaggcgtggcgtaaatgtcaggcctggttgaaagatattgaaagcgctcggttgcagcataaccaggcgtataccgaagccatgcttaccgagtatgcggattttttccgccaggtcgagtctagtccgctgaatccggcgcaggcccgggcagtcgttaatggcgagcattctctgttagtgctggcaggtgcaggaagcggaaaaacgagcgtgctggtggcccgtgcaggctggttgctggcgcgtggtgaagcgtcccctgagcaaattttattgctggcgtttggtcgcaaagccgctgaagagatggacgagcggattcgcgaacggctacataccgaagacattaccgcacgcacgtttcatgcgctggcgctgcatattattcagcagggcagcaaaaaagttccgatagtcagcaaactggaaaatgataccgctgcccgtcatgaactctttattgctgagtggcgcaagcaatgcagcgaaaagaaagcgcaggcgaagggctggcggcaatggctgacggaagaaatgcagtggagtgtgccagaaggtaacttctgggatgatgaaaaattacagcgtcgccttgcctctcgcctcgatcgctgggtaagtctgatgcggatgcacggtggtgcacaggcagaaatgattgccagtgcacccgaagagattcgcgatctgttcagtaaacgtatcaagttgatggccccgttattaaaagcctggaaaggtgcgctgaaggcagaaaacgctgtcgattttagcggccttattcatcaggcgattgtgattctggagaaaggtcgctttatcagcccgtggaagcatattctggttgatgaatttcaggatatcagcccgcagcgggcagcgttgttagcggcattacgcaagcaaaacagtcagacgacgttgttcgctgttggtgatgactggcaggcgatttaccgattcagcggtgcgcaaatgagcctcaccaccgctttccatgaaaactttggtgaaggcgaacgctgtgatttagacacgacttaccgttttaacagtcgtatcggtgaggtggcaaaccggtttattcagcagaacccaggccagctgaaaaagccgctaaacagcttaaccaatggagacaaaaaagccgtcacgttattggatgagagtcaacttgacgctttgctggataagctctctggttatgccaaaccggaagagcgcattctgatcctggcgcgttaccatcacatgaggcctgccagcctggaaaaagcggcaacacgctggccgaagttgcaaatcgactttatgaccattcatgccagcaaagggcaacaggcggattacgtcatcatcgttggcttgcaggagggaagtgatggttttccggctgcggcgcgggagagcattatggaagaggcgctactgccaccggttgaggatttcccggacgctgaagaacggcggttaatgtacgtggcgctgacccgggcacgccatcgggtatgggcactgtttaacaaagagaatccctctccctttgtggaaatactgaaaaatctggatgtgccggtggcgagaaaaccgtaagaaacaggtggcgtttgccacctgtgcaatattacttcagacggtccgcgagataacgctgataatcggggatcagaatatcgaccgcgtcgttgaaatgcgggctctggattatgaagtctgccgttgccacgttggtggcgaccggaatgttccataccgtcgccagacgcagcaaggctttcacgtcaggatcgtgcggcacggcatttagtggatcccagaagaaaatcaatacatcaattttcccttcactgatcaatgcgccaacctgctggtcaccccccattgggccactcaacatcgcgttgacgttcatgccggtcgcgcgggaaattaagttaccggtagtgcctgttgcatacagtacgtgttgttccagtaacggttgatgccgttccacccagctcatcagcatttgtttgcagtgatcgtgtgccaccagcgcaatatgtttccgcgcaggtaaagtgcgagtcgtcagttccataatgtacatccgtagttaactttcctacagattactgtaagcacttatcgctgcaagataaagaccgaaaaagcctgcgcacaggcacaaaaatctcaggaagatggttgtttttccgcccactgcaggaaagtatttcgcgtttgtgggtcagccagtttaaaccaatacttcagccgttgttctgtgagcacctgagactgcggtggaatagcatccagctcggaaacaccgctaagcagcgtactgtcatctgccatcatcgtggcaaattgcggtagactagcgcgtttcgcggatttgttatagcgttcaacctcgacctcataatcaatcgtttttgccgtactggtaatggcgagaatatccagctttaccggaatcggcgtcgcatcgccatccaacaattcaaggcgcggcgcggcatcaaaatggttagcttcccgctcattctccaggcgaggcaggcgaaaattgacctggttgatgagctgggtattaaaactgaccaccagcggtggggagatatacagccgttcttcactattggaaagatgaatcgtcttctcaacgcgaaacactaactgatgcggtccattatccagttcaatgctgtccgcaccgcgcagcagagagctggaaaccttcttgccgtcgagtaccagaagatcgacatcggtactaagccgcagcgtggtggcaaaaacggataccggcaaacataatgcaatcaaggtggtcacgatgccggttttcataggtagctcctgtcaaaagaccgcccgaataataatgtgtcaaaatttttctttaatcatacttactaacatatagacatatttcccgcttttgctctcattcattcgtattagctgcatggttggcatgtcggctttgtcgtacactttgttaaacagtctggaggaaataatgaaagaaaccgatattgcaggcattttaacgtccactcacaccattgcgctggtgggggcaagcgacaaacccgatcgtcccagctatcgcgtgatgaaatatctactcgaccaggggtatcacgtcattccggttagcccaaaagttgccggcaaaacgctgctgggccagaaggggtatggcacgctggcagacgttccggaaaaagtcgatatggtcgatgttttccgtaatagtgaagcggcgtggggcgtggcacaggaagctattgccattggcgcgaaaactctctggatgcaactgggggtgattaatgagcaagcggcagtactggcacgggatgccgggttaaatgtggtgatggatcgctgcccggctattgagatccctcgcctgggcctggccaaataaaaaatccccggaaggcaaaaaccttccggggatttgttcagggattagttacgcagacgcggggcctggagttgtttgcggatggtctgcgccagctcatccatggatggctgttcaggatgttcatcctgcaattcgctacttagctgggcttcagccaggtaggtatgaaccggtaggccgttatcgtcctccatcactacgtgataccacggagcggcgcgaagctcgtcattcaccgccagctcatcagggctcggttcagagaggctataaaccgggtcgatatccacgaccactccgagataacctaacagggaatggcggacctgctggccgataccgaatttgctggcaatcatagtcacctcccgggaaatctttacctttgatataagggtaaaattccacatttcaagttacatgacgcgacaggcaaaccctttcagatatagcccttccggataggtagcgatcaccggatgatcggctgcctgacggaactgctctataaattgtacatcacgaccggcatcaattgcggcatccgcgatgattttctgaaataaatcgctggtcatcagaccggaacaggagaaagtcaggagaataccgccttcattcagcagctgaatcgccagcatgttgatgtctttataaccacgacacgcgcccatcaactggcttttattctcaacaaacttcggcgggtccatcacgataacgtcaaatttttcaccgcgatcgcgataagtacgcagcaatttaaagacatcatcacggacaaactcagccttgctcagatccagtttgttcagctcaacgttctgccgtgcaatatccagcgcttcctgggaggtatcaacgctgacaacctggctgcaaccgcccatcagtgcgcttacggcgaaaccaccggtataggagaaacagttcagcacacgtttattttcaacgtagcggcgggtagccaggcggctatcacgctggtccaggtagtagcccgttttgtgtccgtgctgaatatccaccagcagtttcattccgtgttcttcaatcggcagcagggcaggtggcaactcgccggtgacggggccctgggtcagctccattccttcttttttacgtaccgcgacgtcgctgcgatcgtaaatgctacattccgggtacagcgtttgcagggcactaattaatgccgcgcgctgatattctgccccagcactcagcagttgcagcaccagaaaattaccgaaacgatcgatagtaatacccggcaggccatcagattctccggcgattaaacgatagctgtcgaggccatctttttgcgccagccagtcacgccatttttgtgcttgttgcaaacggcgggaaaaaaaagcaatgtcgatagactcagacgggtcaaacgtccagacgcgcgcccggatttggctagctgggctataagcgccgcgtgctaaccattttccctgatgatcaacaatatcgatggtttcaccgaggctggctttaccttccatgcgggcaacggccccggaaaagacccacggatggcgacgaagtaatgatttttcgcgccctttggctaacactaaacgtacactcataatttacttttctgtcgatgcaaagaaatgggcgtcattgtccggagttttccatggatttgcaacgcgtccattaaggataaggagagcagcaatgagcaaagtctgcataattgcctgggtttacgggcgagttcagggcgtaggatttcgctacaccacacagtacgaagcgaaaagactgggtttaaccgggtacgccaaaaatcttgacgatggcagcgtggaagtggttgcttgcggtgaagaagggcaggtggaaaaattaatgcagtggttaaagagtggcggcccgcgttctgcgcgtgtagaacgggtgctcagcgagccgcatcatcccagcggggaattaaccgattttcgtatccgttaaatacattttaccggttttggcaggccagcaattttggtggcttgcttagccggacctttcggaaacagtcggtataaatagcggctgttacctttttcttcgccaaatttattcgccatcgcttttaccagcatacgaatcgccggagaagtattgaattccagatagaaatcacgcacaaaacgcaccacttcccagtgttccggactcaggctaatcccttcgttctctgcaatcaccacagccagcggctcactccactggctgctttctttgagatagccttcggtatccgtttctatctctttaccttcgaagatcagcataattattactaccttaatcagactggcggcagtgtaacaaaaaacaaagccccgcataaagcgaggctatgaaagtgttagcgggtgagattaatcgcggctagcgaagcccagaatgctcagcaggctgacgaagatgttgtacaggctaacatacaggctaaccgtggcacgaatatagttcgtctcaccgccatgaatgatgttgctggtttcaaacaagatagcgccagaggagatcagaatgaagaccgcgctgatcgccagatgcagagcaggcagctgcaggaagatattcgcaaccataccaatcagcaccaccacaatacccgccatcagcataccgccgaggaagctcatatctttgcgggtggtcagcacatatgcagagcagcagaagaacactaacgccgttccgcccagtgccatagcgattacgtcacccattccggcagacagataggtgttcagaataggtccgaggatataacccagaaaaccggtaaaggcgaatgcggagataatcccggtcggcttattcgccgttttataggtcaggaacatcaaaccatacatacccaccagcgtcagaatcagacccggagatggcagcatcagcaccgtactggcagttgcggtaatcgcgctaaaggccagcgtcaggctcagcagaaaataggtattacgcagcaccttatgggtgctaagcagacttgtacggtcatgactagaactaacaatacgatccattgagtcactctctatgacagatgtaattaattaagcagcataatgataatgcgtaagggcacccagaagttttacccatctttacgcatttgatctggaacaggtttaacagcggattatcaggtcattaagcaaatataacgccctgagaatttcgacaggcaaaagaaaaaggggttagcatttagctaaccccttatcttattggaatgacgcgcactataaacatcccgatgcggcgtgtaaacccctaatttgtttgtttgcctgaaaaacagccaaaagtgcattgatagcgtgaaataacagcagattgatcatttcatcaccatgaattccttctcttttactcgtttagcaaccggctaaacatccccaccgcccggccaaaagaaaaataggtccatttttatcgctaaaagataaatccacacagtttgtattgttttgtgcaaaagtttcactacgctttattaacaatactttctggcgacgtgcgccagtgcagaaggatgagctttcgttttcagcatctcacgtgaagcgatggtttgccttgctacagggacgtcgcttgccgaccataagcgcccggtgtcctgccggtgtcgcaaggaggagagacgtgcgatatgaataacgaggaaacattttaccaggccatgcggcgtcagggcgttacccggcgcagctttctcaaatattgtagtctggctgccacgagcctgggattaggcgcgggaatggcaccaaagattgcctgggcgctggagaacaaaccgcgcattccggtggtatggatccacggtctggaatgcacctgctgtaccgaatcttttatccgctccgctcacccactggcgaaggacgtcatcctttccctgatttccctcgattacgacgatactttgatggctgccgccggaacccaggcggaagaagtctttgaagacatcatcacgcaatacaatggcaaatatatcctcgcagtagaaggtaatccgccgctgggcgagcaggggatgttctgtatcagcagcggtcgaccgtttattgagaaactcaaacgtgccgctgccggagccagcgcgattatcgcctggggaacctgcgcgtcctggggctgcgtgcaggccgcgcgacccaatccgacgcaggcaacgcctatcgacaaagtcatcaccgacaaacccattatcaaagtacctggctgcccgccgatcccggatgtgatgagcgccatcattacttacatggtgacctttgatcgcttgccagatgtcgacagaatgggccgtccgctgatgttctatggtcagcgaatccacgataaatgctatcgccgcgcccacttcgacgccggagagttcgtccagagttgggatgatgacgctgcccgcaaaggttactgcctgtacaaaatgggctgcaaagggcctaccacctataacgcctgttcctccacacgctggaatgatggcgtttctttcccaatccagtctggtcacggctgcctgggctgtgcggaaaatggtttctgggatcgcggtagcttctacagccgcgtggtcgatattccgcaaatgggtactcattccaccgccgataccgtcggtttaaccgcgcttggcgtggtggcagcggctgttggtgtgcacgcagtcgccagcgccgttgaccagcgcagacgtcataaccagcaacctacagaaaccgaacatcagccaggcaatgaggataaacaggcatgagcactcagtacgaaactcagggatacaccatcaataatgccggacgccgcctggtggtcgacccgattacgcgcatcgaaggccacatgcgctgcgaagtgaatattaacgatcagaatgtgatcaccaatgccgtctcctgcggcaccatgtttcgcgggctggagatcatcctacaagggcgcgacccgcgcgatgcgtgggcgttcgttgaacgtatctgcggcgtctgtactggcgtacacgccctggctagcgtttacgccatcgaagatgctatcggtattaaagtgccggacaacgccaatatcatccgcaacattatgctggcaacgctctggtgccacgatcatctggtgcacttctatcagcttgccgggatggactggatcgatgtgttagatgcgctgaaagccgacccgcggaaaacctccgaactggcgcaaagtctctcctcttggccgaaaagttcccctggctatttcttcgacgtacaaaaccgcctgaaaaaatttgttgaaggcgggcagttggggatcttccgcaatggctactgggggcacccgcagtacaaactgccgccagaagctaacctgatgggctttgcccactatctcgaagctctcgatttccagcgtgaaattgtcaaaatccacgcggtctttggcggtaaaaacccgcatccaaactggattgtcggcgggatgccttgcgccatcaacattgacgaaagcggcgcggtcggggcagtcaatatggaacgcctgaacctggtgcagagtattatcacccgcacggcggacttcattaacaacgtgatgatccccgacgccttagccatcggtcagttcaacaaaccgtggagcgaaatcggcactggtctttctgataaatgcgttctcagctacggcgcattcccggatattgccaacgactttggcgagaaaagtctgctgatgcctggcggcgcggtgattaacggcgacttcaacaatgtgctgccagtggatttggttgatccgcagcaggtgcaggagtttgtcgaccacgcctggtatcgatatcccaacgatcaggtcgggcgtcatccgttcgatggcatcaccgacccgtggtacaaccccggcgatgtcaaaggcagcgataccaacattcagcagctgaatgaacaggaacgctacagctggatcaaagcgccacgctggcgcggtaacgcgatggaagtggggccgctggcgcgcacgttaatcgcttatcacaaaggcgatgctgcgaccgttgagagcgtcgatcgcatgatgagcgcgttgaacctgccgctttccggtatccagagtacgttaggccgcattttgtgccgcgcgcacgaagcgcagtgggccgcaggtaagttgcagtatttcttcgacaagctgatgaccaacctgaaaaacggcaatctcgccactgcttccacggaaaaatgggaacctgcaacctggccgacagagtgccgtggtgtcggttttaccgaagcgccgcgcggggcgttaggccactgggccgccattcgcgatggcaagattgatctctaccagtgcgtggtgccgaccacctggaacgccagcccgcgcgatcccaaagggcagattggcgcttatgaagcggcgctgatgaacaccaaaatggcgatccccgagcaaccgctggagatcctgcgtactctgcacagctttgacccgtgcctcgcctgtagtacacacgtgctgggcgacgacggtagcgagctgatctccgtgcaggtgcgttaacagcgaaggagaatcatcatgcaacagaaaagcgacaacgttgtcagccactatgtctttgaagcgccagtgcgcatctggcactggttgacggtgttatgcatggcggtgttgatggtcaccggatactttatcggcaagccgctaccttccgtcagcggcgaggcgacgtatctgttctatatgggctacatcaggttaattcacttcagcgccgggatggtttttaccgtggttttgctgatgcggatctactgggcttttgttggcaatcgatactcccgcgagctgtttatcgtgccggtatggcgtaaaagctggtggcagggcgtgtggtatgaaatccgctggtatctgtttctggcaaaacgtccgagtgccgatataggccataatcccatcgcccaggcggcgatgttcggctatttcctgatgagcgtctttatgatcatcactggttttgcgctgtacagcgaacacagccagtacgctatttttgcgccgttccgttatgtggtggaatttttctactggacgggtggcaacagtatggacattcacagctggcatcggctggggatgtggctgattggcgcgtttgtgatcggtcatgtctacatggcgctgcgtgaagacatcatgtccgacgacacggtgatctccaccatggtcaacggctaccgtagccacaaatttggcaaaataagtaacaaggagcgtagttgagctaaataagtaacaaggagcgttcatgagcgagcaacgcgtggtggtcatggggctgggcaacctgctgtgggccgatgaaggcttcggcgtgcgggtggcggaacggctgtatgcccattaccactggcccgagtatgtggagattgtcgatggcggtactcagggactgaacttgctggggtatgtcgaaagcgccagccatctgttgattctcgatgccattgactacgggctggaacctggaacgctgcgaacctatgccggagaacgcattccggcttatctcagcgcgaagaaaatgagcctgcatcagaacagtttctccgaagtgttggcgctggcggatatccgcggacatctgccagcacatattgccctcgtcggtctgcaacccgcaatgctcgacgactacggcggtagcctgagcgaactggcacgggagcaactgcccgctgcggaacaggcggcgctggcgcagcttgctgcgtggggaattgtgccgcaaccggctaatgaaagccgctgtctcaattatgactgtctgagcatggaaaattacgaaggcgttcgcttgcgccagtaccggatgacacaggaggagcagggatgagcaacgacacgccatttgatgcgttgtggcaacgaatgctggcgcgcggctggacgccagtcagtgaatcccgtcttgacgactggcttacgcaagcgccagacggcgtggtgttattaagcagtgacccgaaacgcacgccagaggtcagcgataatccggtaatgattggcgaattactgcgcgagtttcccgactatacatggcaggtggcgattgctgaccttgagcagagcgaagccatcggcgatcgctttggcgtctttcgctttcctgccactttagtgtttaccggcggaaactatcgcggcgtgctgaatggtattcacccgtgggcggaactgataaacctgatgcgcgggcttgtcgaaccgcagcaggagcgtgccagttgatctaaccgcagcaggagcgtgcctcatgagcgaaacttttttccatctgctggggccaggaacgcaaccgaacgatgacagtttcagcatgaatccactgccgatcacctgtcaggtgaatgatgaaccgagtatggcggccctggagcaatgtgctcacagcccgcaggtgattgcgctgttaaacgagttacaacatcaactaagcgaacgccaaccgccgttgggcgaggtgctggcagtcgatctgttaaatctcaacgccgacgatcgtcactttatcaatacgcttctcggggaaggggaagtgagtgtgcgcattcagcaggctgacgacagtgaaagtgaaatacaggaggcgatcttctgcggattatggcgggtgcgcagacgtcgcggcgaaaagttgctggaggacaaactggaggctggctgcgcgccgctggcgttgtggcaggcggcaacgcaaaatctcttgccgacagatagcctgttaccgccgcccattgatggcctgatgaatggcctaccgttggcgcatgagttactggcacatgtacgtaaccccgacgcgcagccgcacagcattaatctgacgcaattacccatcagcgaggctgatcggctttttctcagtcgtctctgtgggccgggaaatattcagattcgtaccattggctatggcgagagctatatcaacgccacggggttacgccatgtctggcatttacgctgtacggacaccttaaaaggcccgttactggaaagttatgaaatctgcccaataccggaagtggtgctggcagcgccagaagatttggtcgactctgcgcagcggcttagcgaggtatgtcagtggctggcggaagctgcaccgacgtaaaaagacggtaagtatcgctttcagtcttatgaatatcgcaatcggcgaatacctctggtcgtagagtttcaggataaagagggagatctaccattatcgggttatttttctctcttcgcctacaggagtgcgcatgtgggatgtcattgatttaagccgctggcagtttgctctgaccgcgctgtatcactttttatttgtaccccttaccctggggctgatttttttgctggctattatggaaaccatttacgtggtcaccggcaaaacaatctaccgcgatatgacgcgcttctggggtaagctcttcggtatcaattttgctcttggcgtggctaccggcctgaccatggagtttcagtttggtactaactggagtttctattccaactatgtgggcgatatttttggcgcaccgctggcgatggaagcattaatggccttcttcctcgaatccacctttgtcgggctgttcttcttcggctggcaacggctgaataaataccagcacctgctggtgacgtggctggtggcgttcggtagtaatctctctgcgttgtggatattgaatgccaacggttggatgcaatacccgaccggtgcgcattttgatatcgacaccctgcgtatggagatgaccagcttcagcgagctggtctttaatccggtcagccaggtgaaatttgtgcacaccgtaatggcgggctacgtgaccggggccatgtttattatggcgatcagcgcctggtatttactgcgcggacgggagcgcaatgtcgcattacgcagctttgccatcggttccgtcttcggtactctggcgattatcggtaccctgcaactcggagacagttctgcgtatgaagtcgcgcaagtacaaccggtaaaactggcggcgatggaaggggagtggcaaacggaacctgcacctgcaccgttccatgtggttgcctggccggaacaggatcaagagcgtaacgcctttgccctcaaaattcccgcgctgctagggatcctcgccactcacagtttagataaacccgtgccgggtctgaagaatttgatggctgaaacctacccacgcttgcaacgcggacgtatggcctggctgttaatgcaggaaataagccaaggcaatcgtgagccgcatgtgttgcaggcattccggggactggaaggtgacctgggctacggcatgttgctctcccgctatgcgccggatatgaatcatgtcacagccgcacagtaccaggcggcgatgcgtggcgcgatacctcaggttgcgccggtattctggagtttccgcatcatggtgggctgtggttccctgctgctactggtgatgctgattgcgcttgtccagacgctgcgtggcaaaatcgaccagcatcgctgggtgctgaaaatggcgctctggagtttgccgttgccgtggattgcgattgaagccgggtggtttatgaccgagtttggtcgtcagccgtgggcgatacaggacatcttaccgacatactccgcgcactccgctttaaccacaggacaactggctttcagtctgatcatgatcgtagggctttacaccctgttcttaatcgccgaagtctacctgatgcagaaatatgcccgtctggggccgagcgcgatgcagagtgaacaaccgacgcagcaacaggggtaaaggagaaaatcatgtttgattatgaaacattgcgcttcatctggtggctgctgattggcgtgatcctggtggtctttatgatctccgacggatttgacatggggatcggctgtctgctgccgctggtggcgcgtaatgatgatgaacgccggatagtgataaacagcgttggtgcacactgggaaggcaaccaggtctggttgatcctcgctggtggggcattatttgccgcctggcccagagtgtatgcagcggcgttttccggcttttatgtggcgatgatcctggtgctgtgcagtctgttcttccgcccgctggcctttgattatcgcggaaaaatcgccgatgcacgctggcgtaaaatgtgggacgccggtctggtcatcggcagtctggtgccgccggtagtcttcggtatcgccttcggcaacttgttgctcggcgtgccgtttgccttcacaccgcaattacgcgtggagtatctcggcagcttctggcaactgctgacgccattccctttattgtgcggattgctcagccttgggatggtgattttgcaaggtggcgtctggttacaactgaaaactgttggtgtgattcatctgcgtagtcagctggcgaccaaacgcgctgcactgttggtgatgctgtgctttttgctggcgggttactggctgtgggtcggtattgatggctttgtactgctcgcccaggatgctaacggtccttccaatccgttaatgaaactggtggcagtgctacctggtgcctggatgaataattttgtcgagagccccgttttgtggatcttcccgctgctgggattcttctgcccattgctgacggtgatggcgatttatcgtggtcgcccgggttggggatttttgatggcaagtttgatgcaatttggcgtgattttcacggcaggcatcacgctgttcccctttgtcatgccgagtagcgtgagtccgatctccagcctgacgttgtgggacagtacttccagtcagctgacgctgagcattatgttggtaatcgtgctgatatttttgcccattgtgttgctctacactctctggagctactacaaaatgtgggggcgcatgacaacagaaactctccgccgtaacgaaaacgagttgtactaaggagcagaaacaatgtggtatttactttggttcgtcggcattttgttgatgtgttcgctctccacccttgtgttggtatggctggacccgcgtctgaaaagttaacgaacgtaggcctgatgcggcgcattagcatcgcatcaggcaatcaataatgtcagatatgaaaagcggaaacatatcgatgaaagcgatcttaatcccatttttatctcttctgattccgttaaccccgcaatctgcattcgctcagagtgagccggagctgaagctggaaagtgtggtgattgtcagtcgtcatggtgtgcgtgctccaaccaaggccacgcaactgatgcaggatgtcaccccagacgcatggccaacctggccggtaaaactgggttggctgacaccgcgcggtggtgagctaatcgcctatctcggacattaccaacgccagcgtctggtagccgacggattgctggcgaaaaagggctgcccgcagtctggtcaggtcgcgattattgctgatgtcgacgagcgtacccgtaaaacaggcgaagccttcgccgccgggctggcacctgactgtgcaataaccgtacatacccaggcagatacgtccagtcccgatccgttatttaatcctctaaaaactggcgtttgccaactggataacgcgaacgtgactgacgcgatcctcagcagggcaggagggagtattgctgactttaccgggcatcggcaaacggcgtttcgcgaactggaacgggtgcttaattttccgcaaagtaacttgtgccttaaacgtgagaaacaggacgaaagctgtagtttaacgcaggcattaccaagcgaactcaaggtgagcgccgacaatgtcagtttaaccggtgcggtaagcctcgcaagtatgctgacggagatatttctcctgcaacaagcacagggaatgccggagccggggtggggaaggatcaccgatagtcaccagtggaacaccttgctaagtttgcataacgcgcaattttatttgctacaacgcacgccagaggttgcccgcagccgcgccaccccgttattagatttgatcaagacagcgttgacgccccatccaccgcaaaaacaggcgtatggtgtgacattacccactagtgtgctgtttatcgccggacacgatactaatctggcaaatctcggcggcgcactggagctcaactggacgcttcccggtcagccggataacacgccgccaggtggtgaactggtgtttgaacgctggcgtcggctaagcgataacagccagtggattcaggttagcctggtcttccagactttacagcagatgcgtgataaaacgccgctgagtttaaatacgccgcccggagaggtgaaactgaccctggcaggatgtgaagagcgaaatgcgcagggcatgtgtagcttggcaggttttacgcaaatcgtgaatgaagcacgcataccggcgtgcagtttgtaatgcataaaaaagagcattcagttacctgaatgctctgaggctgatgacaaacgaagaactgtctaatgcgtagaccggaaaaggcgttcacgccgcatccggccactttcagtttgcaatacgtacgcttgagatcaggattgtctactttgagtataacatccttgtgaaatctccctttcctcataccgcttgcactatatactgcgggtaggaaaggcgcgcagagggaaatataagattgttaactatccccctctggaaatacgacttgtgagcataagataaatcttagcaaaatacaaattaaagataaggaaattgttacgaaagctattaattattgttggtaatatagtttcaagtggtactataactggctgttaaatggcatttataactattaggtgcagagatattcgcttaaatggattagtttctttgtggaaaagtaactgatgttataatgtatgatgttgactatttcactattccaataaaaccagtcagctttaaacaagcagcgtcatattaagagagataaacatttgccgctgttggtcctcgcaggccatttacgcggcaaaattccacacgtaatcctggtataagcacttctgcgtcgcggggagtgaatgcggaaatatggacctgaacttctttacgaccgtcggaggggataatgaatcctttgccgcttttgcgatcaaaggttttgacaattcctgtcattttacgggacaaacaaattccttactgaaaatactgcgctgcactatacggggttaataaaataaagccagcgatatttaagaccgccggacggctaaaataaaatttgcttaatctcaattatcatgcgttaatagctgcgtcggtttgaaagacagacagcatacaaagtagtttactaaagcagttctcattatcaggcattatccccttcttttgagtctctctcctgaacactaagtagtttctgtattaaagccctgtttgccgaaaggcccaaaatgaaggaagtaaaatatgtctaataaaatgactggtttagtaaaatggtttaacgcagataaaggttttggctttatcactcctgatgatggcagcaaagacgttttcgtccatttcaccgccatccagagcaatgaattccgcacgctgaacgaaaatcagaaagttgaattttctattgagcaggggcaacgtggccccgcggcagcgaacgttgttacgctctaaggttgccattattactcaacatctccatttccgctgtccatgttgtcatggttcacagtaccgcacatcggcattcgatgtgacggagcgaaaccctttgggcgctaagtgtattttttgtaaatcgacgatgatcacctttgataacgtcgcgctgcaaatacgcactgaccatgcgccgctggattagtcaaaataatatcaggctccctcgtggagccttttttatatctgccttatttttcttcaacgctgtatgtatagtaagcgataacctgttgattattgaatctttcggggagatggcttataacatttcttacctgaccagggtaccgggaaccaacaccttactggcgtgttgctgtcttttaagaccagaagaggttaacagtgaatattgaagagttaaaaaaacaagccgaaacggaaatcgccgactttatcgcgcaaaaaatcgccgagctgaacaagaatacagggaaagaagtctctgaaattcgcttcaccgcacgagaaaaaatgaccgggcttgaaagttatgatgtcaaaatcaaaataatgtgattttgtgaacatcaccccgtgcgaggtgatgttccgcttgttgctaatttagtgaccaatcattggcgcttgtggaattaagcgtcggtacaattcctccggcaccgggctttgccatactcccgcatacattgcgtaaccaatcaccgcaaacataatccccagaaccagtagcgtcattaaccagccagacaacgcaaaggcttttttatttgccgcaggtttttgcagactaaaggtcaatgtactggctaccggacaactctctacgcaagtcatacagccggtacattccactgttcgtacctgaattaatttatcgaccgggatccgacttgggcaattttttgcgcatttgccacagtcgatacaactttcggcattgcgacgaatcttaaacgggctcaataggctaaccacgcccatcagcgcgccatatgggcaaagataacgacaccaggcatggcgaataaacaggctggcaatcagcaaaacggtcacgctgattaatgtcgcggtccccatatgacgaaagaaatcgagcattttaacgtccatcaccacgctgtaggggctcaacataaaatagtgaatcgcctgagcgggcatcaataacgcgatatagataaaaaaactcaacagcaaatacttcacgccgcgcagaggaatatccagccagcggggaaggacacattgccgaccaaacagtttgttaccgagatcgccgattaattcagaaagcgtaccaaccgggcataaccaactgcaaaaggcctttttgagtaatagactgatgacgataaaagcgaccaataacagcatcgcggcggcgtggacggacggtaactgacctgttacaaggctatatttcagattcatcagcccggcaatcggtagccagccttcgatacctcccggtctggcgacaaatgtcgtgctacttgccgtttcgtaatagcgcacccaataccagaacgtgatggcaatataaatattcattgccaacagtaataattgcgtcgctttacgccaggtcgtggcattacgccagtcattccacggtaatttgccgcccgtcgtgcctggccgccgctgccagcgggttcttttattctctgccatgattttgccagtccgttaagttgtataccaaatgccactattctagttgttcttaactggctgatattgattcaaatcgcgttcaggtctttcttatgcaaccatgcttccagagcggcaacactgcgtgtaatttcttcgtgtggaaggggggcagataatggctgctgctccagttgtgcgcatagctggctggcgatatgcattcccagactgctgcaactgctttttagctgatgcgcggcacgctttattttctcgctatcctgactggcgcgggcaatgtcgatttcatcgagaagcggcagggcatgttgtgtaaataataccagccattcgtggatcttctccgtccccattaactgagcatcttcattgagttggcttacatccaggctttgatcattattgacttgcagttggagatagtgcgccagtaactgaccgagcacttcacgcggcaccggtttagggataatcccgcggaataaactactggtacgctggcgcagcgtttcgtcaatgacatgggcgctaaagccaatcaaaaccaggctcggatattgctgtgccagttgtcgggcaagcgtaatgccgtcgatatccggcagatcaaaatccaccagtgcggcagcaaacggttcgctattttgcagtgtctctaaagcctgcgcggcattgccaacagcaacaatctgcgcaccactggttttcagcatctcaatggtaattcgctgggttagcgggttatcttcaattaacagcaaacgtaaaccgtcaagacgcaccgcctgattgactgtttttggcacgggtgccgtggcaacacgtaacggcaagcgtaaacaaaaacagcttccaacctccggcgtgctggtggcgctcagttcgccgcccatcgcctgggccagacggctactgatagtcagtcccagcccggtgccgccgcgtttgccgcttacctgcacaaatggctggaagatttctgccagtttcgcgggatcaataccgcagccgctgtcttccacttcgaccagccattgctcgccatcagtgcgactacgcaggataatgtacccttcgtcagtaaaacgcagggcgttgctcaacaggttggttataacctgacgaatacgtcgtggatcgcccattaacgcgcacggcatatcatcggcaattgccgttgccaggcgaatcgggcgacctttcacccgtccgctcattaattgcagggtactttccagcagcgggcgcggttcaaagggctcatcgctgacgctaacattcttgccacctgcttcgatagcggaataatcgagaatatcgttgaggatggtcagcaagctttcaccagagtcagtaattgcccgcaaatcatcacgctgggcgttaagtgcggggttatctgccagcagttgagcagtgccgagaataccgtacagcggtgtgcggatctcatggctcatcgccgccagaaacgcgctttttgcctggctggctttttctgcttccgcccgtgcctgtcggtgttctatcaccagttcctgcaattcagctgtacgcgctttgacctgcgccgccagctgttcgcggtggcgattcagtgcatgaacattgctgcgaaacgcatccatcagccgcccgatggtatccagctcccgtacgccagcggtttccgggaaaggggagtcaatatcaccgtccagcagccgttgcagcgcctgcgtttgttcggcaagtggacgcgtgacactgcgataaaccacgcgccagaggatcagaatcagtgcgcaaagactaaccatccccagcaataacaggctgtattgcccgcgtgcactcgctttttccagatgcgccagtccgtgctgattacgcagctcaatggtgtcgaccagctgactgacttcgctactaaactgcgcgaactgggcgatgttattttgtgcgagagtttgtaggtgattgctgatttcactgtcctgctgatacagcgccagcaaatcgctatattggctaacggtagttaacgttgttgcgacctgcgcacgaacacccggatcttcaatgcgtatttgccgacgttgcagaattttcaccgcattattgagctgcttttccagcgttggtgcatttttctggatctgctccagccccagattcatcaccatttgctgcacccgcagagcgctaaggcgcagttcattcatctggttaacatactcaagatcgatatcaatcagccgatcgagtgcactttcagcagcctgacgctgatcttgttcgatcaaatcgtaaatcccggcctgggtcgctccagcggaagttgtcgcattattcgcctgaccttgcgccaggcgtgcgatctcatcggcggcagcgactatctgctgactgagttgctgttgttgctggcgcagttgcaaacgctgccccaccagttccccttgctgacgtaagctacgggagatctcctgctcctgttgttcaatagcggtggtatcaaaaccttgttcccgtaacgcttgcagcaacgcattaatcttcaggctttgtgcggtgagcattcgcccctgcgcctgccacatcttttcgttatcggcactggtcaggttctgcgcggcgaaaagttcccaggcgctggcttcgctcaactggcgcgccatattcatggtaggaatcaatgcctgagtgttgtctttttccacctggctgataaagcgcaggttgtaccatcccaccagggtactggtcagggttaacagcgccatcagggcaaagcccatccagagtcttcgggtcagggttaaattcacggtcggtgcactttaggtgaaaaaggttgagtcgcaaagcggaatgcatctagcataaagccttattattgatgaggctatcatgcgcgtactgctatttttacttctttcccttttcatgttgccggcatttagcgctgataacctgttgcgctggcatgatgcgcagcatttcacggtgcaagcctctacgccgcttaaagccaaacgcgcatggaaactgtgcgcgctttatcccagcctgaaagatagttattggttaagcttgaactatggtatgcaggaggctgctcgccgctacggtgtggatttaaaagtgctggaggcaggcggctacagccagttggctacccagcaagcacaaatcgaccagtgtaaacagtggggcgcagaggccattttgctcggtagtagcacgaccagttttcccgacctgcaaaagcaggtagcaagtctgccggtgatcgaactggtaaatgctattgatgctccccaggtgaaaagccgcgttggtgtgccctggtttcagatgggctatcaaccggggcgatatctggtgcaatgggcgcacggtaaaccactgaatgtgctgttgatgcccggacccgataacgccgggggcagtaaggagatggtcgagggttttcgcgcagccattgccggaagcccggtgcgtattgttgatattgcgcttggtgataacgatattgaaatccagcgtaacctgttgcaggagatgctggaacgccatccagaaatcgacgtcgttgccggaacggccattgcggcagaggcggcaatgggggaagggcgtaacctgaaaacgccgcttaccgtggtgagcttttatcttagtcatcaggtgtatcgcgggctgaagcggggaagagtgattatggctgccagcgatcaaatggtctggcagggggaactggcggttgagcaggccatcaggcaattacaggggcaaagcgtttctgataatgtcagcccaccgattttagttctgacgccgaaaaatgccgaccgtgaacatattcgccgcagcctgagtccagggggatttcgtccggtctatttttatcagcacacaagtgcggctaagaaataatcagcacacatcagcggctaagaaataaccttcaccatgttgcgtcaccagtaaatccgcgctgagtttatgacgtaaacgacgaattaacacatcgacggtgcgcaggtcagggttttccacccgacgcgcagaaagcatacgtagcagacgttcacggctgagaatttcgcccggattcgtcacaaatgccaccaacatttcatactctgcgcgggtcagtttaatcggctcgccatcccgctccagcgtatggcggctcacattcaggcaataaccggcaaagcgatagcagttgtcctgagtgtgcggttgagcttgtcgcgcgaggtcgattcgccagagcagatttttcacccgtactaccagttcgcgcagttccagcggtttggtgacgtaatcgtctgcgcccatttccagcccaacaatacggtcaatccgatcgctgcgtccggtaaccagaataatccccaccgtactgcgttctcgcagggcgcgggttaacatcaggccattttcatcgggtaagttgatatccagcagaattaaatctacgctctgattctgcataatttcccgtagcccagcaccgctcgccgtaacggaaacggtatacccctcctgagtgaagtaggattgtaatcgcgcctgggtaaccggctcatcttcaacaataacaatgtgatgtggcatcagagggttttactcattctgttcatatctgttcatattctgccgtaagccgttcatcctgaccagtgccgctgttcatatttgctcattaagatcgcttcactaaaccataattctacaggggttattatgcggaaactctggaacgcgctacgccgacccagtgctcgttggagcgtactggcgctggtcgcaattgggattgtgattggcattgcgctgattgtattgccacacgttgggatcaaagtcaccagcacaaccgaattttgtgtcagttgccacagtatgcaaccggtgtatgaagaatataaacagagcgtgcatttccagaacgcctccggcgtgcgagctgaatgccatgactgtcatatcccgccggatattccaggcatggtgaagcgcaaactggaagcgagcaatgatatctaccagacctttattgctcactccattgatacacctgaaaaattcgaagccaaacgcgcggaacttgccgagcgtgaatgggcgcgaatgaaagaaaacaacagcgcaacctgccgctcctgccataactacgatgcgatggatcatgcgaagcagcatcctgaagcagcacgtcagatgaaggtggcagcgaaagataatcaatcctgcatcgactgtcataaaggtattgcccaccagttaccggatatgagtagcggcttccgtaagcagttcgatgagctgcgcgccagtgctaatgacagtggtgacacgctgtactctattgatattaagccaatttatgcggcgaaaggcgataaagaagcctctggttctctgctgcctgctagcgaagtgaaagtccttaaacgtgacggcgactggctgcaaattgaaattaccggctggacggaaagcgccggacgtcagcgtgtactcacccaattcccaggtaaacgcatctttgttgccagcattcgtggtgatgtgcagcagcaggtaaaaacgctggagaaaaccaccgttgccgacaccaataccgagtggagcaagttgcaggccactgcgtggatgaagaaaggcgacatggtgaacgatatcaaaccgatctgggcttatgcggatagcttgtacaacggcacctgtaaccagtgccacggcgcaccggaaatcgcccactttgacgctaacggttggatcggcacgctcaacggcatgattggctttaccagtctcgataaacgtgaagaacgcaccttgttgaaatatctgcaaatgaatgcgtctgacaccgcaggtaaggctcacggcgataagaaggaagaaaaataatgaacaataacgatctctttcaggcaagtcgtcggcgttttctggcacaactcggcggcttaaccgtcgccgggatgctggggccgagtttgttaacgccgcgacgtgcgactgcggcgcaagcggcgactgacgctgtcatcagcaaagagggcattcttaccgggagccactggggggctatccgcgcgacggtgaaggatggtcgctttgtggcggcaaaaccgttcgaactggataaatatccgagcaaaatgattgccggattgccggatcacgtacacaacgcggcgcgtattcgttatccgatggtacgcgtggactggctgcgtaagcgccatctcagcgatacctcccagcgcggtgataaccgttttgtgcgcgtgagctgggatgaagccctcgacatgttctatgaagaactggaacgcgtgcagaaaactcacgggccgagtgccttgctgaccgccagtggttggcaaagcacggggatgttccataacgctagcgggatgctggcgaaagctattgccttgcatggtaatagcgttggtacgggcggagattactctaccggtgctgcgcaggtgatcctgccgcgcgtagtcggtagcatggaagtgtatgaacagcaaacctcctggccgctggtattgcagaacagcaaaaccattgtgctgtggggctccgatttgctgaaaaaccagcaagcgaactggtggtgcccggatcacgatgtttatgaatattacgcgcagctaaaagcgaaagtcgccgccggtgaaattgaggtcatcagcatcgatccggttgtcacatccacccatgagtatctggggcgcgagcatgtgaagcacattgcggttaacccgcaaactgacgtgccgctgcaactggcgctggcacatacgctgtacagtgaaaacctgtacgacaaaaacttccttgctaactactgtgtgggttttgagcagttcctgccgtatctgctgggtgagaaagacggtcagccgaaagatgccgcatgggctgaaaaactgaccggcattgatgccgaaaccattcgtgggctggcgcggcagatggcggcgaacagaacgcaaattattgctggctggtgcgtgcagcgtatgcagcacggtgaacagtgggcgtggatgattgtggttctggcggcgatgctggggcaaattggcctgccaggtggtggttttggttttggctggcactacaacggcgcaggcacgccggggcgtaaaggcgttattctgagtggtttctccggctctacgagcattccgcctgttcacgacaacagtgactacaaaggctacagcagcactattccgattgcccgttttatcgatgcgatcctcgaaccggggaaagtgatcaactggaacggtaaaagcgtaaaactgccgccgctgaaaatgtgtatttttgccggaactaacccattccatcgccatcagcagatcaaccgcattattgaaggcttgcgcaagctggaaacggttatcgccatagataaccagtggaccagtacctgccgctttgccgatatcgtactgcctgcgaccacgcagtttgagcgtaacgatctcgaccagtacggcaatcactccaaccgtggcattatcgccatgaaacaggtggtgccgccgcagttcgaggcgcgcaacgacttcgatattttccgcgagctgtgccgtcgctttaatcgcgaagaagcctttaccgaagggctggacgaaatgggctggctgaaacgcatctggcaggaaggtgtacagcaaggcaaaggacgcggcgttcatctgccagcgtttgatgacttctggaataacaaagagtacgtcgagtttgaccatccgcagatgtttgttcgccaccaggcattccgcgaagatccggatctcgaaccgctgggcacgccgagtggcctgattgagatctacagcaaaactatcgccgatatgaactacgacgattgtcaggggcatccgatgtggtttgagaaaatcgaacgctcccacggtgggcctggcagccaaaagtatccgttgcatctgcaatctgtgcatccggatttccgacttcacagccagttatgtgagagcgaaacgctgcgtcagcaatatacggtagcgggtaaagagccagtattcattaacccgcaggatgccagcgcgcgcggtattcgtaacggtgatgtggtacgcgtctttaacgctcgcggtcaggtgttggcaggggcagtggtttctgaccgctatgcacccggcgtggcacgaattcacgaaggggcatggtacgatccagataaaggcggcgagcctggtgcgctgtgcaaatacggtaaccccaacgtgttgaccatcgacatcggtacaagccagctggcgcaggcgaccagtgcgcacactacgctggtggaaattgagaagtacaacggaacagtggagcaggtgacggcgtttaacggccccgtggagatggtggcgcagtgcgaatatgttcccgcgagccaggtgaaaagttgaattaacccgcgtcgcaggtgaaatcatgaccacgctgacagcacaacagattgcctgtgtttacgcctggctagcgcagttgttctcccgtgagctggacgatgaacaactgacgcaaatcgccagtgcgcagatggctgaatggtttagcttgctgaaaagcgaaccgccgctcactgcggcggtgaacgagctggaaaaccgtattgccacgctgacagtacgtgacgatgcccgtctggaactggccgcggacttttgcggcctgtttctgatgaccgacaaacaagcggcgctgccgtatgcaagcgcctacaaacaggacgagcaagagattaaacgcttgttagttgaggcagggatggaaaccagcggcaatttcaacgaaccggcagatcatctggcgatctatctcgaattgctcagccatctgcattttagcctgggagaggggaccgttcctgcgcgaagaatcgacagtttgcggcaaaaaacactgacggcgctgtggcaatggttaccagagtttgttgcgcgttgtcgtcagtatgacagctttggtttttacgcggcactaagccagttattgctggtgttagtggagtgcgaccaccaaaacagataacgtcgtttgtgcgcctgaaaagacgcgtttagcgtcgcatcaggcattatggcgcagttgccggatgcggcgtgaacgtcttatccggcccacaggaactgtaatctttgtagaccggttaagatgcgtcatcgcatccggcaaacacacatcacggatgagctacaaaccgggaaagccgctggcgcagcaggcggttttcctgcttcaggtgcgcaatatcatccattaacgtcagcgccaccgcgatccccggccagtccagagccagttcatgacgcaggcgtaccgcgcgttgcaccacaatggcggcatggtcgtcaaatacccaggttgtttcctggatctcacgcggttcaaccacccccaaaccgacaatttcattcaactcctcttcagagatgccggtatgcaggcaaaattcggtaatagtaaaagtcaccgtaacattagccattatgctttcccccaatctttacgtggatcaaaagagctctgggcgtctgccagttgctgccacagcgcggcagtgttttcatccggtttcggcggcatcacgattttcagtaccgcatacagatcgccggtctgttttttgctcaccagacctttgcctttaacgcgcaatcgttgcccggcctggctgcctggcgggatagtcagcaaaatgctttctttcagtgttggaacggtgactttagcacccagcgccgcttcccacgggctaaccggcaccacaatttccagatcctggccgacaatatcaaacagcggatgtggcgcaatatgaatcaccagccacaaatcgccatttggaccgccgttttcgcccggcgtcccctggcctttcagacggatgcgttgaccattgccgacgcccgccgggatcttcacattcagcgttttcggaatttcctgttcgatcatgccaaaggcgttataaaccggcaggttatagctgatggtacgcttatgctcagtaagcgtttcttcgaggaataccgccacttcgatttcaatatcgtggccgcgtgtggcggggcgttgacggctctggcgggcatgctgaccgaaaatactgctgaagatatcgtcaaaatcttcggcgttaaaactctgaccgtcgccatggtggaactgacggttaaattgcggatcgttgcgatgttgccacatctgatcatactcagcgcgacgttgttcatcacttaacacttcccaggcttcagcgacctctttgaagcgggcttcggcatccggttctttgctgacatcaggatggtatttgcgggcaagtcgacgataggcggtcttgattgtcttgagatcgtccgtcggtttcacgcccatgatggcgtaataatcctttaattccatagcgttatctcgcgtaaatcaacacaaattgaaggaacccctgtaaggtaactcctataagtgtagggtaatcctcaaaatttcatatgccaacacagaatatgttattgaaatcatcgcggagaggaggtcgccatcaagatgggttgctgaacatattttaaacaggtgaaaaagggtgagcgatttttgatagttgaaccaggcactttaagtttaactagggcgtcattatttattaaattttatagacgctatatatgggtagtaatatacatggaattagttgcactgcaaataattatttgaaacaggcctggaacgatataaaaaatgagtacgaaaaaaatcaaacatatagtatcacgctttttgaaaacacactggtgtgttttatgcggttatacaatgaactcagacgtaaagtaaatgaagaggatactccatgtctggaatgtgaaagtctagaaaaagaatttgaggaaatgcagaatgataatgatctaagtttatttatgagaatattgcgtactaatgatacacaaatttatagtggggttagtggaggtattacatatactatacaatatgttcgagatattgatattgttagagtgtccttgccgggcagagctagtgagtctatcacagattttaaaggttattattggtataactttatggagtatattgaaaacattaatgcgtgtgatgatgttttttctgagtattgttttgatgatgaaaatataagtgtccagccagagcggataaatacgccgggaatatctgatttggattctgacattgatttgtctggtatatcttttattcagcgtgaaactaaccaggcattaggattaaaatatgctcctgtagatggcgatggatattgtctgttaagagctatactggttttaaaacaacatgattatagttgggcgctggtcagttataagatgcaaaaggaagtttacaacgaattcattaaaatggttgataaaaaaacgatcgaggctcttgttgatacggcattctataatctcagggaagatgtaaagacgttatttggcgttgatctacaatctgacaaccaaattcaggggcagagtagtcttatgagttggagctttctgttttttaaaaaacaattcattgatagttgcttgaataacgaaaaatgtatcctgcatttacccgagtttatatttaatgataacaagaacttgcttgctttagataccgacacgagcgataggattaaagcggtgaagaattttcttgttgttcttagtgatagcatttgcagtttatttattgttaatagtaatgtggcaagtatctccttggggaatgaatcctttagtacagatgaagatcttgagtatggttatttaatgaacactggcaatcattatgacgtttacctccctcctgaactttttgctcaggcttacaagttaaacaataaggaaatgaatgcgcaactcgactatttaaatcgttatgcaatttaatggcaaaggcatatgctaaaaaccattgttattagtctcacacttttttattggtaaatattgtctctgtattggtaacgccgcagatattctgtttagccacaggtgcaattatcagcggcgtacgcgaggcaggggctaatcaggcatagtttgcgtcaaaccttgcctgtttttgaagatgtatatagaaaaacaggcgttcaacaagccattttgcgaacctgttcccggaaaaaagtcatatttctgtcacactctttagtgattgataacaaaagaggtgccaggaatgaacaaaacgctaatcgccgcagctgtggcagggatagttttactcgctagtaacgctcaggcacaaaccgtaccggaaggctatcagctacagcaagtgctcatgatgagccgccataacttacgtgcgccgctggcgaacaatggcagtgtgctggagcagagtacgccgaataaatggccagaatgggacgtccccggtgggcaactcaccaccaaaggtggcgtgctcgaagtgtatatgggccattacatgcgtgaatggctggcagagcaggggatggtgaaaagcggggaatgcccgccgccgtacaccgtttatgcctatgccaatagtctgcaacgtaccgttgcgaccgcacagttctttattaccggcgcattcccggggtgtgatattcctgtgcatcaccaggaaaaaatgggcactatggacccaacctttaacccggtgatcaccgatgattccgccgcattcagtgaacaggcggtggcggcaatggagaaagagctcagcaaactccagcttaccgacagctaccagctactggaaaaaatcgttaactataaagattcccctgcctgtaaagagaaacaacagtgtagcctggtggatggcaaaaatacctttagcgccaagtatcaacaagaaccaggtgtttccgggccgctgaaagtcggcaacagcctggtagatgcgtttactttgcaatattacgaaggttttccgatggatcaggtggcctggggagaaatcaaatctgaccagcagtggaaggtgttgagcaagcttaaaaacggctaccaggacagcctgtttaccagtccggaagtggcgcgcaatgttgcgaaaccgctggtcagttatatcgacaaagctctggtcaccgatcgcaccagcgcaccgaaaattacagtgttggttgggcacgactccaacattgcctctctgttaacggcgctggatttcaaaccgtatcagttgcatgaccagaacgaacgcacgccgattggcggcaaaatcgttttccagcgttggcatgacagcaaagccaatcgcgatttgatgaaaattgaatatgtgtatcagagtgcggaacagttacgtaatgccgatgcgttaaccctgcaggcacctgcgcagcgtgtgacgctggaattaagcggttgcccgatagacgctgatggtttctgcccgatggataagtttgatagcgtgttgaatgaagcggtgaaataacagaaaactcccccgcgagaagcgggggagtcgctggttaaacgtttttacgttcgatggtctgttcgccccaaaaaaggctatctttatcggtcttagcaaaggctttgactaacacttcatcactaccttcttcccaaatcttttccgccattttttcgtcgtacccggcgacttcgaaaatggcctcggctatttccgggctcgtattgcgcagagatgcccattcaccgacgtgatgagctttcgcttcttgagttggcatgcgtatcctcctgttgaagattagccgttaagtttaactgccagacctgcgacatattccccttgataacgagcaatagacagttcttcctggctgggctggcgactaccgtcaccgcctgcgatggtggttgcgccgtacggcgtaccgccgcgaacctgactaacgtcaaataattcctgcgctgcgtagccaatagggacaattaccatgccgtgatgcgcaagggtcgtccaggtggatgtgatggtttgttcctgaccgccgccagtaccggtggaactaaagacgctcgccagttttccgtatagtgcgccggaagcccacaggccgcccgtctggtcgaggaaggtacgcatttgaccggacatgttgccaaagcgggtaggtgtaccaaaaataatggcgtcgtaatcggccagttcttgcggggttgcaaccggtgcagtttgcgttttaccgcctgctttttcaaataattgcggcggcatggtttccggtacacgcttaacgacaacttcagcgccatccactttgcttgcaccctcagcgactgcgcgtgccatcgtttcaatatgtccgtacatggaataataaagcaccagaactttagccatttctaaccactcctcgtgttatctctattccgtagcgattcgctaccacttatttaaagataagacgtccttttcagagtgcaaatttcacaaccacttatttgatttataacaactttcacaagcacgtaattttgtcgcaaaatgacacatttttatctcatcgcgtttttttaatcataagagcggcttatggataattattggagatgatatctattctcgctaagaagctgttgcaggatattaccaaacgcgggtctgcccgcgtcagttcactaagcttagtcccacgtagcgaaaatatggcagccgccatacgccgcgttaattctatgcaatatgatgtctatacccagacggaggtcagtaatggcaaaccatcgaggcggttccggcaattttgcagaagaccgcgaaagagcaagtgaagcaggtaaaaaaggtggacagcacagcgggggtaatttcaagaatgacccgcagcgcgcatctgaagcaggtaaaaaaggtggtaagagcagtcacggcaaaagcgacaactaaccgggctaatcaatgacgaatgcatttttgtctgtagctcgtcaaaaagccatcaccgccggttacccggtggttgatactgatgacaaatgtaagcttgcctgatgcgcgatgcttatcaggcctaccagaagattgcaatatattgaatttgcactgttttgtaggccggataaggcgtttacgccgcatccggcatgaacaatgcgtacgttgtcaacaatctgcaccgccggtaaccccggcggttttctgtttatggctcctgatgaacaacttctggcggtggaacgtcaaccaactttctgcttaacaacgcattgagtaaaatcgcgccaaaggttgctgtaccaatccctcccaacgtaaaaccgcccagcgtgagagcaaaatcacccgcgcccagcactaaggttactgcgaccataatcaaattaccgttctggcttaaatcgacacggttttgtacccatatccttgcgcctgcgacggcaatcagcccgaacacaacaatacttgcaccaccaataaccgcggccggaatggtatgaatcagcgcaccaaatttcggactaaagcccaacagcatggcgatgacggcagcagcaacaaacaccagcgtgctgtagactttggtcacggccatcacaccgatattttcagcataggtggtcacgccgctaccgccgacagagccggaaagcatcgttgccagaccatcgcctacgaatgcccgccccatatacgggtccatattgcgtccggtcatcccggcgactgccttgagatgacctaagttttccgccaccagaatcaccgccacgggcgcaatcagcatcattgcctgaccattaaaagcaggagtggaaaaatgtggcagaccgaaccaggcagcatggctgacgagagtaaaatcgacggcttttcccagccctaaaacgttggtcatcacgccatacagcagacaggcgacaattaatcctacgagaatcaataaccgctggatcatgccacgggtaaacaccgccaccagcccaatacacagcaccgtcattaccgccatccagctatcaaaggcgctagcgcttacacttttcactgcgataggcgctaagttcaggccaatcgccatcaccaccgcacccgtcaccaccggcggcatcagtcgttcaatccagcgcgtaccgattttcatcaccaccaggccaatgacggtataaaccagcccacaggcgataatcccgcccagcgcaatgctgatattcgggttaatgccctgaccgttaaagcccgtcgcggcgatcaccacgccgacaaaagccgcgctggagccgagataactggggacgcgcccgccggtaataaagaaaaacagtaacgtgccgatcccgctcattaaaatggaaagattgggatccagccccatcagaatcggcattaacaccgtcgcgccaaacatcgccaccgcgtgttgaacgcccattactgccgtctgagcaaacggcaatcgttcatccggcgcgaccacgccgctctctgtagaggtgctttttaactgccagtgaggaaaaccgaacattgccatcagctgtctccttaaggaggttaacaagcagggcgcatcagcgcgtgataactgcgatcgaaccacaccagcccgtagggtgtggtgtgacgatgaatcgcttcgatggcgcaaaacagaatgtcgtgggtgccgacgctcaccacctggctgatacggcagtcaaagctaaccagagcctcttccagttgcgggcatccggtcacccccgtctgccagcgggcggcggcaaagcggtgttccatgggcgttttgccgccaaaaaggttactaagcggctcctgcccggcgctaagtgtatttacacacagcgttcgattttcattgaatgccggccagacggacgccccacgattcaggcacaccagtaatgtgggcggcgtatcggtcacactgcagacggcgctggcggtgaacccggcgcgcccggctggaccgtccgtggtgataatattgaccgccgcgcccatgcaggacatcgcatcgcgaaaagtttgttgatcgacaatgttcatagtttgctccttacaacagcccgcaggcttcttcaaaggacagacgtggcaggcgcgcataaagcttgctgctatcgccatagccgatattaatcagcagattgctcttcagcgtgctgcccgtaaaaaaggcgtcgtccacgtgttgacggtcaaagccgctcatcgggccggtatccagtcccagcgcccggcaggcgacgatcagataggccgcctgcatggaactgttgcgaaacgctgtttcttcggcaagttgtgggctggaggtaaaccaactgcgggcatcaccgtggggaaacagtagtggtaaccgttcataaaattcactgtcccaggcgacgatagcggtgacgggcgcggtcagggttttttgcagattgccgctggaaagtgccgggcgcagacgttcttttccttctgccgtgcgggtaaacacgatccgtgccggagaacagttagcacttgtcggcccccatttcatcagggcataaatctcccgtaacgtctcatcgctgacgggtgtctcccgccagccgttgtgagtgcgggcatcggtgaacagggtgctaagcgcacctgggctaacggcttcgttcatagcaattccttacagggcggcttcacggtgatgtaacaggctggcaagcccgttgagtaacagagcattaaacgtttcgggatcggtcacgttgcaggcgtgtccgccatagggcatcaccattttctggctatcgggcagggcggcatgaagttcactggaacatgctgttggcaccagcagatcatcactggcgcagatgatttgcaccgggcagcggatgcgatccgcatggtgactaaagtcagcgcgtttgagggcgttaagtcgacgcagtaaattatttttgccctgaaaatgcgccagtgccagcgcgtcttctgcctccaggcgaggtgcgcgggccgccatccagtcggcgggatagaggaacaacggctgcgcttccacccatgcctgcgcgccgccgctatacagtaatcgttcgcgaacctgaaaacagcggcgcgtatgggcgtttattcgtagccagccgttaacgctgatcagcacagttacgctcgcgggataatccagcgccagctgcattcccaccagcgcaccgagcgcatggccgaccactgcgtaatgctcaatccctgcggctaccagcgcctgatgcagttccgctgccatctgggcgatactgtaatcttctgccagcgtgtcgggattattgccggtgccgcgctggtcgtaacagactacctgatactcctgctccagcaccgccagttgcggtaaccagtaactgccgctacccccaagaccgctaatcaacaccactacgggcgcatcagcataagggggaggactgagactaagtttcatcgcggcctcacttggcgatatgcgcaattgtggcgatttccaccagcgcgtcaggttttaccagtccgcactgaatgcagaatcgcgccggtttatcacccggaaaaaactcggcgtagatttcgttaatcgcggcgtaatttttccagtcggtaataaagatgctgttgaaggtcacatccgccatcgtgccacccgccgtctcgatcaccttgcggatagtttccagaacgtggcgggtttgcgcctttgggtcatcggcaaacagcacgttattatgttgatcaaaagccagcgtaccggagacatacaccacgccatcagccagcgtgccgggaacgaagggggccagcggtgcgctgctgccagcgggaataattacggattttggcatcgttaaactccttaagcgatatgagcaaaggacgtgggagaaagcgcgtcgcagaatgtttcgacgtcgctgacccagccaaaaaaggtttcgatattgaacaacgcggctttctgcgcaaatttcggccccgcctggtgagttgcgtcttcaagcaccacgccgaaatactccagaaaaaagccgtcgcgtagcgtgctttcgacgcagacgttggtagcgatgccggtgaaaaccagatggcgtattccgcggctgcgcaaaatgctgtccagcggcgtattgaagaaaccgctgtagcgcggcttcggcagcacaatatcgccaggctgcggcaccagttcatccaccagttgataatcccaggagcctttcgccagcaatttcccctgcagctgcggctgcttacgcatggttttcagggcgttgcttttatgaaaattcggactgccgggtccgccagcctcgacatactgttcatcccagccattttgaaaccagatgatcagcatccctgccgctcgcgctgcggtcacggcggtttgaatgttggcaatgaccgggcgagtggtactgacatcaaacccggcgagatctaagtagccgcctggcgtggcataagcgttttgcatatccaccacgatcagcgcactttgctgcggatcgaaggtaatggcttccggtcgagcggttaaggtcgtcatcatgccacctcctgagtcagcgcaggtagatgggcgcggcattgcatcagtggttgaatgcgctcgccgaaggtttcgattccgctcagaaaatcgtcgaaggttaacagcacgccttcggcaccaggcacgcttgcgacttcatctaacatgcgcgcgacactggcgtaagaaccgactaacgtccccatattgatgtttaccgcgctagtgggatcggccatctgacgaacgttggtgtcagtaccggagcgggtatctttctgactttgttcggttagccagcttaacgcctcttcatccgcgcccgctttgtagtgttcccatttggcgcgagcggcatcgtcggtttcatcggcaatcaccataaacaacacataagagccaacgtcgcgtccggtttgctctgcggcctgtttcatccgcgcagcggtcggggcgaaagccgtgggtgtatttacgcctttgccgaaacagaagttgaaatcggcataccgggcggagaacgccatgccagcgtcgctttgcccggcgcagatcactttcatggggacactcggttgcggactcacgcgacaatcattcatggtgaaaaaatcgcctttaaaatcgcttttccccgtgccccacaggtcgcgcagcacctgaacatattcggtgagatagtcgtaacgacgggagaaatagtcatcgccaggccagatacccatctgctcatactcgggcttttgccagccagtcacgaggttgacgccaaaacgcccgccagagatggagtcgatggttgcggccatacgggcgacgattgccggaggtaacgttaaggtggcagcagtggcgtaaatctgaatgcggctggtcacggccgccagccccgccatcaaggtgaagctctcaaggttgtgatcccagaactcagttttgccgccaaagccacgcagtttgatcatgctcagggcgaaatcgaaatggtagtgctccgctttttgcacaatggctttattcagttcaaaggtcggcatgtactgcggcgcgtgggtgctaatgagccagccgttgttgccaataggtacgaatacgccaattttcatcatcaacctctcttcgtctcgtaaagtgaaagtcagacggggcgctgcatcctgcatatccttttcagccgcgtattggcttgtttgcaaagcggatgccagtttttaaaaagttaatgttattaatctgttaacattacgttatctaaaatatctggtaaaaagtggactaaacggtcaaaacagttgcacataaaacatgcatctgtgcgcgatgagagtgcagaaggtcgaggccgggcgggggttttgctatcctgttgccaatctacaagaggggagagcgcatgacgcaaggcgcagtgaaaacaacgggtaaacgtagccgcgcagtaagcgcgaagaaaaaagcgattcttagcgcagcactggacacttttagtcaattcggttttcacggcacaaggctggagcagatcgcagagttggcgggtgttagtaaaaccaatctgctgtattactttccgagtaaagaggcgctgtatattgccgtgctgcggcagattctcgatatctggctggcaccgttaaaagcgtttcgtgaagatttcgccccgctggcggcgatcaaagagtacatccgtctgaagctggaagtcagtcgcgattatccgcaggctagccgcctgttctgtatggagatgctggcaggcgcgccgctgttaatggatgaactgacgggcgatttgaaggcattaattgatgagaaaagcgcgctgattgccggttgggtcaaaagcggcaaactcgcgccgattgatccgcagcatttgatttttatgatttgggcttccactcaacattacgccgatttcgcccctcaggtggaggcggtgacaggcgcgacgttgcgcgatgaggtatttttcaatcaaacggttgaaaacgtgcagcggattattattgaggggattcgaccacgttaaagatgccggaggaggttgtaacatcctccggctacctgtttaacctatagtcattaagctggcgttaccgccagcggcagcggtattcacactcaggctacgctcgatatacagccgttccagaaggatattgctttcgccacgggcaaaaccctgcacgctaacaattgtgccatcccgcgcggcaactgcttcacacaatgcgcgaagctgatcgctatcaccgtggaagatcaccgcatcaaacggttgagcggttatattttccgctttcgccagttgaatacgttcgctgactgcgcttggcaatgccttcactaactgacgatgcagcgcgtcatccggccacagtacctggctgcccaccgccagcacggcggcgagctgagtcagcgcatcctgctcatcatcggcaatacacaacacgcgctcacgcggcagcagcgtccaggtgttgcgttcacccgtcggccccggcagcaatcgttgtgttcctgcctgcgccagctcgccatattgcgtacataacgcctgcaattctggacgatttgctgcccattcccgcagtgcatttagcggctgagtcaatgcggctttcaactgcgcatcgaccggatactttgcatcctgacgcgcgagcgtcactgccagcgcactttccgggcgattcgccagcagacggtagagatagagcggaccgcctgctttcggcccggtaccggacaacccttcgccgccgaacggctgcacaccaaccactgcgcccaccatattacggttaacatacaggttaccaacatgggcgctgccagtgacctgggcgatggtttcatcaatgcgcgtatggacgccaagcgtcagaccataaccggaagcgttaatctgctcgatcagctctggtagctggttacggttgtaacgcaccacatgcagcaccggaccaaagacctctttttgcaattcggcaaagtcatccagttcgatcagcgtcggggcgacaaaggtgccgctttgccattcacgggcatcttcgctgttttcccgcaccgcctggaacaccggacggcctttgctacgcatggtctgaatatggcgctcaatattggctttcgcttcgctatcaatcactggaccgatatcggtggtcaggcgacccggattacccatccggcattcggccattgcgccgcgcagcattttcaacgtgtggtcggcaatctcatcttgcaggcacagcacgcgcagcgcgctacaacgctgacccgcactgtcgaacgcgctggccagtacatccacgacgacctgttcggtcagtgcactagaatcgacaatcatcgcgttcatgccgccggtttcagcgatgagcggaatagggcgaccctgagcgtccaggcggctggcgatattgcgctgcagtaacgtagcgacttcggtactaccggtaaacatcaccccgcgcacgcgatcatcacccgtcagttgcgcgcccacggtttcaccccgacctggcagcaattgcaccacgcctggcggtacacccgcttccagcaaaatggcgatcccttgcgcggcaatcagcggcgtttgttctgccggttttgccagcacgctgttacctgccgccagtgcggcggcgatctgcccggtgaaaatagccagcgggaagttccacggactgatacacaccacaggccctaatggacggtgggtttcgttagcgaaatcatcccgcacctgtccggcgtagtagtggagaaaatcgaccgcttcgcgcacttcggcaatggcgttactgaaggtttttccggcctcacgcaccagaataccaatcagttgctgcatctggctttccatcagcacggcagcgcggtgcaaaatcgctgcgcgttcagccggaggcgtggcaaaccagattggcgcgttattaaccgcactttccagcgcctgttctacttcacgcggcgtggcttcacgcacatagcccacaatatctttcggttccgcagggttaataacggggctcatctcacctgccgctaccggttgttccagcattggcaaggcctgccatttttgcagtgcactattgagcagggcagaggagaggctggccaggcggtgttcgttagcgagatccagccctgcgctgttgtcgcgcccgtgaccgtaaagatcgcgcggcaggggaattttcggatgcggtaatccagtttgcccttcctgttgcgccagtttttctacagcagtgaccggatcggcgaccagttcatccagtggcaaagaggtgtcggcaatacggttaacaaagctggtgttagcaccgttttccagcaggcgacgcaccagatacgccaacagcgtttcatgtgtgccaaccggagcataaatacgacacggacggttaagtttgccgtcggcaactttcccggggacctgctcatacagtggctcgcccataccatgcaggcactggaactcgtactgacccgggtagtagttctgccccgccagttgataaatcgccgccagcgtatgggcgttgtgcgtcgcgaactgcgggtagattagattcggcaccgccagcagctttttcgcacaggcgagataagaaacgtcggtatacaccttgcgggtataaaccggataaccttcaaggccgtccatctgcgcacgcttaatttcactatcccagtacgcgcctttcaccaggcgaatcatcagacggcgacggctgcgggtggcgagatcaatcaggtaatcgatcaccaacgggcagcgtttttgataagcctgaataacaaaaccgatgccgttccagcctgccagttccggctcgaaacagagtttttccagcagatcgagggagatctccaggcgatcggactcttcggcgtcaatgttgataccaatatcgtactgacgcgccagcagggtgagacttttcagacgcgggtaaagctcttccattacccggtcatactgggcgcggctataacgcggatgcagcgcgctcagtttgatactaatgcccggcccttcatagatgccacgaccgttagacgctttaccgatggcgtgaatcgcctgctgataggaaaccatatacgcctgtgcatctgcggcggtcagcgcggcttcgcccagcatatcgtaagagtaacggaaacctttctcttccagcttgcgggcattggctaacgcttccgcgatggtttcgccagtgacgaactgctcacccatcaggcgcatcgccatatccacacctttgcggatcagcggttcaccgcttttaccgataatgcggttcaggctgcgggagaggctggcttcgttatgggtggaaaccagtttgccagtaaacagcagcccccaggtggcggcattaacaaacagactcgggctacgaccaatgtgactctgccagttaccgttgctgattttgtcgcgaattaacgcgtcgcgggtggctttgtcgggaatacgcaacaacgcttccgccagacacatcagcgccacgccttcctggctactcaggctaaactcctgcaataacccctggaccatacctgcgcgaccactggcatttttttgattacgcagtttatcggccagctgatacgccagtttgtgcgcctgttcagcaactggctgcggcaggcgggcttgttccagcagcatagaaaccgcttcggtttccgggcggcgataggccgcggtgatcgcggcgcgggaaacgctctggggcaatatttgctcggcaaagtcgaggaatggctggtgtggttcctctgccggagtcggtgcttcatcgctctcattggccgcgccagaaagcagcgcaggtagctccggcagagtatcgctgttttccagttgttcgagataagaaaaaatcgcctgcttaattaaccagtgtggtgtgcgatcgatacgtgtcgcggcagacttaatacgctcacgcgtcgcgtcgtccagcttaacccccatggtggtggttcccatgccattactcctgttgttcagaaaggtgcaacttaacgttatcgtgaaatatccatgatgttgcaactttgtgcaaccatgttaaatgtgacatgcgtagcaagcttaaaaatgaatgaaatgttaataaaagaaatcgatatgacagggattaaaaaaataactcagactttttctctgcggcagttaacatttttgaaaggtgcaaccgcaaaaaatgtgagagagtgcaacctgatgaaaaatagtgtcgctgagcactaaaatttaatgtaaatggtgtgttaaatcgattgtgaataaccagcgcttccggcaggatacggtcgccctggtaaaacataaactctgttaccccgttccggtggcagatataacggcaagtttcgacattgccgataataattttttggagactttagatggctattagcacaccgatgttggtgacattttgtgtctatatctttggcatgatattgattgggtttatcgcctggcgaagtacgaaaaactttgacgactatattctgggcggtcgtagtcttgggccattcgtgacggcattaagcgcgggtgcgagcgatatgagcggctggctgttaatggggttgccgggcgctgtttttctttccgggatttccgaaagctggatcgccattggcctgacattaggcgcgtggattaactggaagctggtggccgggcggttgcgtgtgcataccgaatacaacaataacgccttaacactgccggattatttcaccgggcgctttgaagataaaagccgcattttgcgcattatctctgcgctggttattttgctgttcttcaccatttattgcgctagcggcattgtggcaggcgcgcgtctgtttgaaagtacctttggcatgagctacgaaacggctctgtgggcgggcgctgcggcgacgatcctttacacctttattggcggtttcctcgcggtgagctggactgacactgtacaggccagcctgatgatttttgccctgatcctgacgccggttatcgtcattatcagtgtcggtggctttggtgacagcctggaagtgatcaaacaaaagagcatcgaaaacgttgatatgctcaaaggtctgaactttgttgccattatcagtctgatgggttgggggctgggttacttcgggcagccgcacattctggcgcgttttatggcggcggattctcaccacagcattgtccatgcgcgtcgtattagtatgacctggatgatcctctgcctggcaggggcggtggctgtcggcttctttgggattgcttactttaacgatcatccggcgttggctggtgcggtaaatcagaacgccgagcgtgtgtttatcgaactggcgcaaattctgtttaacccgtggattgccgggattctgctgagcgcaattctggcggcggtaatgagtaccttaagttgccagctgctggtgtgctccagtgcgattaccgaagatttgtacaaagcgtttctgcgtaaacatgccagccagaaagagctggtgtgggtagggcgtgtgatggtgctggtggtggcgctggtggcgattgcgctggcggcaaacccggaaaaccgcgtgctgggcttagtgagctacgcgtgggcaggctttggcgcggcgtttggtccagtggtgctgttcagcgtgatgtggagtcgcatgacgcgtaacggtgcgctggcggggatgatcatcggtgcgctgacggttatcgtctggaaacagttcggctggctgggactgtacgaaattattccgggctttatcttcggcagtattgggattgtagtgtttagtttgctgggtaaagcgccgagtgcggcgatgcaaaaacgctttgccgaggccgatgcgcactatcatagcgctccgccgagtcggttgcaggaaagctaagggacttagcctgcggcggttttgtttggcttcagcagcgggttgcgctcccttaatgtgcctcgccatataaattgaatggtgcagggagcgcgcagggggcggccaatcgccgccgccccctgctgtcccggccttcggggaacgcttcagcgattttgacgccaccaacacccgagctgttattatgttccgggcaaaaagttagatttgataatcgcggatggacgaaattgcttgatacacccgcttatcagttttacatggaagctctgatgcattgagtctggacagttttgtcggctggatacggcgtttacgcggcatccggcaagaacacatggttctttgcaaacaatcccatctttctaccctggaataatcgtttatatcccttggcattacctctctttgtttacattccaacatcattttataaacattccgcttgtgtttttctttgccgtaatgataatcgctatcactgcgatttacttttctttgcatagattgactcagaaaaacgtttaagggtgggtggcatgtttgttccgtttctcattatgttgcgcgaaggacttgaagccgcgctgattgtcagtttgattgccagctatcttaagcgtacccagcgaggccgatggattgtgtgatgtggattggcgtgttgcttgccgctgcgttgtgcctgggcttgggtatcttcattaacgaaaccaccggcgaatttccgcaaaaagaacaggaactgtttgaaggtatcgtggcggtgatcgccgtggtgatccttacctggatggttttctggatgcgcaaagtgtcgcgcaacgtcaaagtgcaactggaacaggcagtcgatagcgcattgcagcgtggaaatcatcatggctgggcgctggtgatgatggtcttttttgccgttgcaagggaagggctggagtcggtctttttcctgctggcggcatttcaacaagatgtcgggatctggccgccgctgggtgcaatgctcggtcttgctactgccgtggtgctaggcttcctgctctactggggcggtattcgcctcaatcttggtgcattttttaaatggaccagcctgtttattctcttcgtcgccgcagggctggcagctggtgccattcgcgcatttcatgaagccggattgtggaaccactttcaggaaatcgccttcgatatgagtgcggtgctctcaactcactcgctgtttggcacgctgatggaagggatttttggctatcaggaagcgccgagcgtcagcgaagtcgccgtctggtttatttatctcatcccggcgctggtggcatttgctctgccaccacgcgcaggggcgacagcgtctcgctccgcgtaacaaatacgacgcaaactcttgcttagttacaacatactttaaagggatagtctcgtcatgaccattaacttccgccgtaacgcattgcagttgagcgtggctgcgctgttttcttctgcttttatggctaacgccgctgatgtgccgcaggtcaaagtgaccgtgacggataagcagtgcgaaccgatgaccattacggttaacgccgggaaaacacagttcattattcagaaccacagccagaaggcgctggagtgggagatcctcaaaggcgtgatggtggtggaagagcgggaaaatatcgcccctggctttagccagaaaatgacggcgaatttacagcctggcgaatacgatatgacctgcggtctgctgactaacccgaaagggaagttgatcgtcaaaggtgaggcaacggcggatgcggcgcaaagtgatgcgctgttaagtcttggtggtgcaattactgcatataaagcgtatgtcatggcggaaaccacgcagctggtgaccgacaccaaagcctttaccgacgcgattaaagcaggcgatatcgaaaaagcgaaagcactgtatgcaccgacgcgccagcactatgagcgtattgaaccgattgctgaactgttctccgatctggatggcagcattgacgcccgtgaagatgattacgagcaaaaagccgccgacccaaaattcactggtttccaccgtctggaaaaagcattgtttggcgacaacaccaccaaagggatggatcagtacgctgagcagctttataccgatgtggtcgatttgcaaaaacgcatcagtgaactggctttcccacctagtaaagtggtcggcggcgcagccggactgattgaggaagtggcagccagcaaaattagcggtgaagaagatcgctacagccacaccgatctgtgggatttccaggctaacgttgaaggcagccagaaaattgtcgatttgctgcgtccacaactgcaaaaagccaacccggaactgctggcaaaagtcgatgccaactttaaaaaggtcgataccattctggcgaaataccgtactaaagacggttttgaaacctacgacaaattgaccgatgccgaccggaatgcactgaaaggaccgattactgcgctggcggaagatctggcgcaacttcgcggtgtgctgggactggattaagcgttatgcagtataaagatgaaaacggcgtgaatgaaccgagtcgccgacgtttactgaaagtgataggtgcactggcgctggcgggaagttgtccggtcgctcatgcacaaaaaacgcaaagtgcgccgggtacgcttagtccggatgctcgcaatgagaaacagccgttttatggtgagcatcaggcagggatcctgacgccacaacaggccgcaatgatgctggtggcgtttgatgtgcttgccagcgataaagccgatcttgagcggttgtttcgcttgttgactcagcgttttgcttttctgactcagggcggagcagcaccagaaacgccaaatccgcgcctgccaccactcgattccggcattcttggcggctacattgcgcccgataatctcaccatcacgttaagcgtgggtcacagtttgtttgatgagcgctttggccttgcgccacagatgccaaaaaagctgcagaagatgacgcgtttccccaacgacagcctggatgcggcgttatgtcatggtgatgtgttgctacagatttgcgccaacacccaggacacggttatccatgcgctgcgcgatatcatcaaacacacgccggatttgctcagtgtgcgctggaagcgggaagggtttatttccgatcacgcggcgcgtagtaaaggcaaagagacgccgattaatttgctgggtttcaaagacggcactgccaatcccgatagccagaatgataagttgatgcaaaaagtggtgtgggtaacggcagatcagcaggagcctgcgtggacaatcggtggcagctatcaggcagtacgcttgattcagtttcgagtggaattttgggacagaacgccgctgaaagaacagcagacgatttttggccgtgataagcaaaccggtgcgccgctgggaatgcagcatgagcatgatgtgcctgattacgccagcgacccggaagggaaggtgatcgcgctggacagccatatccggctggcgaatccccgcacggcggagagtgagtccagcctgatgctgcgtcgtggctacagttatagtctgggcgtcaccaactccgggcaactggatatggggttgctgtttgtctgctaccaacacgatctggaaaaaggcttcctgacagtacaaaaaaggctcaatggcgaagcgctggaggaatacgttaaacctatcggcggcggttatttttttgcgctgccgggggtgaaggacgcgaacgattatttcggaagcgcgttattgcgggtttaatgtttttaggcggataaggcatttgtgcgcagatgcctgatgcgacgcttgcgcgtcttatcatgcctacaatcagtgcgggtttggtaggctggataaggcgttcacgccgcatccggcgatcgtgcactgatgcctgatgcaaatcctgctgaaagcacacagcttttttcatcactgtcatcactctgtcatctttccagtagaaactaatgtcactgaaatggtgttttatagttaaatataagtaaatatattgttgcaataaatgcgagatctgttgtacttattaagtagcagcggaagttcccggcagtgatagtcagtcactatggagatcgcggatggtaacgtcctgtactggacatgttttagataatcaacgcgccaccactcgcggagttttctcctccggtagtcatctcgtcactttgcattttcaacctcatcctttctttagttgtgttaccgacgccgtaaacggtgcgcgtagccgttttagcgcattttatccaaaagcaaactatggcttacaaggaagccaaccctctgatgttcgtgcgcataatcgcgctgccaacggcgcgtgtgatgaatacaaacaactcaaggtgctctccatgggaagacaaaaagcagtgatcaaagctcgtcgcgaggcaaaacgtgtgctgagacgggatagccgcagccataagcagcgtgaagaagaaagcgtcaccagccttgtgcagatgggcggcgtagaagccattggtatggcccgcgacagtcgcgatactagccccatcctcgcgcgaaatgaagcgcaattgcactatctgaaggctattgagagtaagcagctgatattcgccacgggcgaagccgggtgcggaaaaacctggatcagcgcagcaaaagcggcagaggccctgatacataaggatgtcgacaggattatcgtcacccgtccagttctgcaagccgatgaagatcttggcttcttacctggagatatcgcagaaaagtttgctccctattttcgcccggtctacgacgtgctggtccggcgcttaggggcttcctttatgcagtactgcctgcgaccggaaatagggaaggtggaaattgcgccgttcgcctatatgcgtggacgtacctttgaaaatgcagtcgtcattcttgacgaggcgcagaatgtgactgccgcgcaaatgaaaatgtttttaacccgcctcggggagaacgtgacggttatcgtcaacggtgatatcacgcaatgcgatttgcctcgcggcgtgtgctccggattaagtgacgcgctggaacgtttcgaagaagatgaaatggttgggatcgtccggttcggtaaagaggactgcgtacgtagcgcactttgccaacgtacgctgcatgcctacagttaagtgtgttatcggtgcagagcccgggcgaaccgggctttgttttgggtgttcccggtgtgtgcaatatacgaaaaaaaagcccgtactttcgtacgagctcttctttaaatatggcggtgagggggggattgactcgcttcgctcgccctgcgggcagcccgctcactgcgttcacggtctgtccaactggctgtcgccagttgtcgaaccccggtcggggcttctcatccccccggtgtgtgcaatatacgaaaaaaaagcccgtactttcgtacgagctcttctttaaatatggcggtgagggggggattcgaacccccgatacgttgccgtatacacactttccaggcgtgctccttcagccactcggacacctcaccaaattgtcgttcctgtcttgctggaacgggcgctaatttagggaaatcatgacctgaggtcaacaaactttttgaaaaaatcgcgcgtttattcaaacttcaatcaatgtgtggttttaataagcgaaatctgctttttttgccaccgaccacggatttgttatgctggtggcctttgtagatcataacgataagtgcgaataaatttcgcacaacgcttttcgggagtcagtatggatatcatcttttatcacccaacgttcgatacccaatggtggattgaggcactgcgcaaagctattcctcaggcaagagtcagagcatggaaaagcggagataatgactctgctgattatgctttagtctggcatcctcctgttgaaatgctggcagggcgcgatcttaaagcggtgttcgcactcggggccggtgttgattctattttgagcaagctacaggcacaccctgaaatgctgaacccttctgttccactttttcgcctggaagataccggtatgggcgagcaaatgcaggaatatgctgtcagtcaggtgctgcattggtttcgacgttttgacgattatcgcatccagcaaaatagtagccattggcaaccgctgcctgaatatcatcgggaagattttaccatcggcattttgggcgcaggcgtactgggcagtaaagttgctcagagtctgcaaacctggcgctttccgctgcgttgctggagtcgaacccgtaaaagctggcctggcgtgcaaagctttgccggacgggaagaactgtctgcatttctgagccaatgtcgggtattgattaatttgttaccgaatacccctgaaaccgtcggcattattaatcaacaattactcgaaaaattaccggatggcgcgtatctcctcaacctggcgcgtggtgttcatgttgtggaagatgacctgctcgcggcgctggatagcggcaaagttaaaggcgcaatgttggatgtttttaatcgtgaacccttaccgcctgaaagtccgctctggcaacatccacgcgtgacgataacaccacatgtcgccgcgattacccgtcccgctgaagctgtggagtacatttctcgcaccattgcccagctcgaaaaaggggagagggtctgcgggcaagtcgaccgcgcacgcggctactaataaagcatcaggattcctgctatccttggcgggaattgaatacaggagagagttatgtatcccgtcgaccttcatatgcataccgttgccagcacacatgcatatagcacattaagtgattacattgcccaggccaaacaaaagggcattaaactttttgcgatcaccgatcatggcccggatatggaagatgcgccgcatcactggcacttcattaacatgcgtatctggccgcgagtggttgatggggtagggatcctgcgcggcatcgaagctaacattaaaaatgttgatggtgaaattgactgcagcggtaaaatgtttgacagcctggatctaattattgccggttttcatgagccggtttttgcgccacatgataaagcgaccaatacacaagcgatgatcgccactatcgccagcggcaatgtgcatataataagccatcccggaaatcccaaatatgaaatagatgtgaaagccgttgctgaagcagccgcgaaacatcaggtggcgctggaaatcaataattccagttttttacacagtcgtaagggcagtgaagacaactgtcgtgaggtagccgcagcggtacgtgatgctggaggttgggtggcattaggcagcgattctcacaccgcgtttaccatgggggaatttgaagagtgtcttaaaatcctcgacgcggtagattttccgccagagcgcattttgaatgtttctccgcgccgcttactgaacttccttgaatctcgcggtatggcaccgattgcggaatttgcagacctttaattactagtaatggaaatatattaatgaacgagttttctatcctctgtcgtgtgctgggtagcctctattaccgccaaccacaagatcctttactggtgccgctgtttaccctgattcgtgaggggaaactggctgcgaactggccactggagcaggatgagttgctgacacgtttgcagaaaagctgtgatatgacgcaagtctctgccgattacaatgcgttgtttatcggcgatgaatgtgctgtgccgccatatcgtagcgcatgggttgagggcgcgacggaagcggaagtgcgcgcttttctttctgagcgagggatgccattagcggatacgccagccgatcacatcggcacattgctgctcgcagcttcctggctggaagatcagagtacggaagatgagagcgaagcactggaaacactgttcagtgagtatctgttaccctggtgtggtgcgttccttggcaaagtggaggcccatgcaaccacgcctttctggcgcaccatggcaccgctaacccgcgatgccattagtgcaatgtgggacgagctggaagaagattctgaagaataagtgtgatctacgtcactcataactgcaacggataatttgttgttgcataaaatgtgtgctcgatctcattcatggccgcgttttctgctatcatgcgcggcatgaacatacttctctctattgcaatcacaacaggcattctctccggtatctggggatgggtggctgtttccctgggcttactaagctgggcgggcttcctgggctgtacggcctactttgcctgcccgcaaggtgggctgaaagggctggcgatctccgctgcaaccctgcttagtggcgtggtgtgggcgatggtcattatttacggtagtgcactggcaccacatctggaaattctcggttatgtcataaccggtattgtcgcgtttctgatgtgtattcaggccaaacagctgctgcttagttttgttccggggacgtttataggcgcatgcgcgacgtttgccgggcagggtgactggaaactggtgttacctagcctggcgcttgggctgatatttggttacgcaatgaaaaacagtggcctgtggctggcggcgcgtagtgcaaagacggcgcaccgtgagcaggaaatcaaaaataaagcgtgaggggcactcacgctttcgcttaaacagtaaaatgccggatgataattccggcttttttatctgtcaggattccggtggaacgctcatatggcggtatttcaccagaatgtcattctgccgttctgctttattttgcaaatcccacagaccacggtcgataccatcattaatcaggaaaatgacccctgtttcgatagcgctcatcaggcacagcataacaggttcgttgctggtgtaacccacttccccttcaagcaagcgctggtagtcaataaagcggaaaaccccggcctgaacttcataggaaagtatcgtcttactggtgttcacgctagaaaggatctcgccggtactcacattgacgacgcgcaggttcacggcaatctgatcgagctggtattgcgtgtcggcaccgatgccaaaatatcttgccccaaccccgccagatttgacgttgctttcataaccgataatgctaccttcaaccatgatatttgccgccgttaaagattgcagcgggattcggttattaatggcaaccgtgccgttttcttgtgccgcacgaataatcttgcgctcgttaagcaggttttgtaagccctggcgctccagcggtataaaccagcgagaatctttcagtgccgtgaccagcattgccgtggcgctttgcggaacagcagtggagaagttacttgccgggtagggtttaaattgcccggtttcgtcctgaatgttgtatacgctaacaaagattttacccgtcggcgctggcagatgggtcaaatctttgtagctctgagcacgaggcattaatgtcggtctggcggcttctttaggcggggcggttaagcatccgctcagtaacatgacggcaaccaaaagaaataagcgctgcatgattattttccttatgaagctggggcttaaaaatcggtactgttattttgtaaaccgctaacctggatggtgctggtttgtccggttttacgatctgtcacgttcaactgcaattgaccatcgcggttggcaatatcgacaatataatcgttggtcaccatgcggcccggtttaccggtattaatattgctcagtagcccacctaaaatttgactctggatggcctgagtaaagttatctaacgcactgggtgtttcaataccaaagtcatcgttatagctcggatctttataagagttttgggcctgagcgctatttaataaaaaagcgccattatttgggttaccaccaaagtttggattacggaactggaaagtcatggttccagcccaacttaatgggctaataagcatgagtagaactactgcatgtttgacacgcattgcagcctccgaacaattttttatttagaattcatcatgcgccaaatcgcccgtacttaataacgcctgatttatctggcgacgatttagtgcttcttcagtttgaatcagtgcaaagacgacagttttctcgaagtctcttttcaacggaaataaaaaagtctggaaaataacgtcctgattgaccgttatagtgatccagcttccccatcgtgcactgggcctttcattaatcgttaagttacccgtatagtcactttcccatttatcactaaaggctcggtaaaaatcatggccaatagaactaacagtatggtcagttagcaatcccgggacttctacctcaacggcgtgaagattccctgcggcgaacagaaattctgccgccacaatccagcgtaaataacgtttcatggctttatcgcctgaggttatcgtttgcccaggaaaccgcttgtgtccggttttttacggctatcttcttgaaaagattataaagatgcgttttaaccgtattttcgctgatgaacaagctacgagcgatctcgttattagacgcgccgatacgcagcttattcaggatctctttttcccgatgagtaaggagggcactttccgtgctgttataacgatagttaccactatgcgtaatcaggtagctggcaagcttttgcgtaaagtagcattcgccgcgcaggacgccttgcaacccattgacaacacgttcttgatcctccatggaataaaaaacgccgttgatatgaggccagttttcaatgtcgcggtacgggtaatcttcaggcgtatttagcaacaatattttgatattgttgtttttcctgctcaaagtatcctgccaataatggataagctttttatccgcttccatcatatccagaagaataatagagccactagagatatcgtccagagaacgttgaatattatgtaattttcctgtaattgccaggctttgtttaaggtgctgcaagagagctgtcgcctgcaaagaagatttagtgatcaacaataatgtatgaccatgaatactatggacttcattaaacatgatgaaaccccgctttttttattgatcgcacacctgacagctgcctctaaaatagaagcaccagaagtactgacagatgttgcactgctgtgtgtagtaataaatcagccctaaatgggtaaaatataaaactaatggattacatctgatttcaatctagccattacaaatcttaaatcaagtgttaaacatgtaactaaatgtaactcgttatattaaaatgttaaccttaaggttttattaagtttagaaatgatagaaaagttgtacatttggtttttattgcacaattttaaaaaatcatacaaatggtgataacttactaataatgcatataaaaaatatttcggtgtagtcctttcgtcatgtaaaacgttcttgttttttctccacacctccgtggacaattttttactgcaaaaagacgaggtttgtcacggcttgtgcgcaagacatatcgcagcaatcagcgacgggcaagaagaatgactgtctggtgctttttgatagcggaaaacggagatttaaaagaaaacaaaatatttttttgcgtagataacagcgtatttacgtgggttttaatactttggtatgaactaaaaaagaaaaatacaacgcgcgggtgagttattaaaaatatttccgcagacatactttccatcgtaacgcagcgttaacaaaatacaggttgcgttaacaaccaagttgaaatgatttaatttcttaaatgtacgaccaggtccagggtgacaacatgaaaaacaaattgttatttatgatgttaacaatactgggtgcgcctgggattgcagccgcagcaggttatgatttagctaatagtgaatataacttcgcggtaaatgaattgagtaagtctagttttaatcaggcagccataattggtcaagctgggactaataatagtgctcagttacggcagggaggcagtaaacttttggcggttgttgcgcaagaaggtagtagcaaccgggcaaagattgaccagacaggagattataaccttgcatatattgatcaggcgggcagtgccaacgatgccagtattagccaaggtgcttatggtaatactgcgatgattatccagaaaggttctggtaataaagcaaatattacacagtatggtactcaaaaaacggcaattgtagtgcagagacagagccaaatggctattcgcgtgacacaacgttaatttccattcgacttttaaatcaatccgatgggggttttacatgaaacttttaaaagtagcagcaattgcagcaatcgtattctccggtagcgctctggcaggtgttgttcctcagtacggcggcggcggtaaccacggtggtggcggtaataatagcggcccaaattctgagctgaacatttaccagtacggtggcggtaactctgcacttgctctgcaaactgatgcccgtaactctgacttgactattacccagcatggcggcggtaatggtgcagatgttggtcagggcagtgatgacagcagtatcgatctgacccaacgtggcttcggtaacagcgctactcttgatcagtggaacggcaaaaattctgaaatgacggttaaacagttcggtggtggcaacggtgctgcagttgaccagactgcatctaactcctccgtcaacgtgactcaggttggctttggtaacaacgcgaccgctcatcagtactaatacatcatttgtattacagaaacagggcgcaagccctgttttttttcgggagaagaatatgaatacgttattactccttgcggcactttccagtcagataacctttaatacgacccagcaaggggatgtgtataccattattcctgaagtcactcttactcaatcttgtctgtgcagagtacaaatattgtccctgcgcgaaggcagtagtgggcaaagtcagacgaagcaagaaaagacccttagtttgcctgctaatcaacccattgctttgacgaagttgagtttaaatatttccccggacgatcgggtgaaaatagttgttactgtttctgatggacagagtcttcatttaagtcaacaatggccgccctctagtgaaaagtcttaatttgttgaaatatcgagcataagatgaatctggagagaatggtctgctgcgaatcagccaacctgaaagtatggataacacaaccctcaaggatgactaatcattgaggaaatagaataaatgttcagaccttttttaaactctcttatgctcggcagtttgttttttccttttattgccattgctggaagcaccgtgcaagggggcgtgatccatttttatggccaaattgtggaaccggcatgtgacgtcagcacccagagtagtcccgtagaaatgaactgcccacagaatggttctattccgggcaaaacctactccagcaaagcgttaatgagcggcaatgtcaaaaacgcgcaaatagccagtgtaaaagtgcagtatcttgataaacagaaaaagctggctgtaatgaacatcgaatataactaagtttctgaacaactcacgttgctgagcagaaaaatgcgatttaaccaaaaagcctgctgtacacttaagaaacaagaaggtgtaaggaggcgttatgaaaacgcgtattcatgttgtgcagggtgatattaccaaactggccgttgatgtgattgtgaatgcggctaatccgagtttaatgggaggcggcggcgtcgatggggccattcatcgcgcagcgggtccggccctgctggatgcttgtttaaaagtcaggcaacagcagggcgattgccctacggggcatgccgttattacgcttgcaggcgatcttcccgctaaagccgtagtgcacaccgtcgggccagtctggcgtggtggtgaacaaaacgaagaccagcttttgcaggatgcctatctcaatagcctacgactggtggcggcaaacagctatacgagtgtggcttttcctgcaatcagtactggggtttatggttaccctcgtgcggcagcggctgaaatcgcagtaaaaaccgttagtgaatttattacccgtcacgctttacccgaacaggtatactttgtctgttatgatgaagaaaacgcccacctctacgaaagactccttacccaacaaggagatgaatgatttgccccggctggcgagcgcggtgctgccactgtgtagccaacatcccggtcagtgtggcctttttcctctggagaaaagtctggatgcgtttgccgcccggtatcgtctggccgaaatggcagagcatacgctcgatgttcagtattacatctggcaggacgatatgagcggtcggttactgttttccgccctgttagccgcagcaaagcgtggcgttcgcgtccgtttgttgctggacgacaacaatacgcccggacttgacgacattttacgcttgcttgacagtcatccacgcattgaagtccggctttttaatcctttcagctttcgcttgctgcgtccgcttggttatatcaccgacttttcccgtcttaatcgccgtatgcacaataaaagtttcactgtcgatggcgtggtgaccctggtgggaggacgaaatattggtgatgcctattttggagcaggggaggagccactttttagcgatttagatgtcatggcaataggacccgtggtagaggacgttgccgatgatttcgcccgctactggtattgcaaaagcgttagtcccttacagcaggtgctggatgtcccggagggtgaaatggcggatcgcatcgagttacccgcctcctggcataacgatgccatgacgcatcgttatttacgcaaaatggaatccagtccatttataaatcatctggttgatggaacattgccgcttatctgggcgaagacacgtttattaagtgatgatccggcgaaaggggagggcaaggcaaaacggcatagtctgttaccgcagcgcctgttcgatatcatgggcagtcccagtgaacgcatcgatattatctcttcctattttgtaccgacacgcgcaggtgtggcgcaactcttacggatggtgagaaaaggggtaaagattgcgatcctaaccaattctcttgccgctaacgatgttgctgtcgtccatgccggatacgcgcgctggcgcaaaaaattgctccgctatggcgtggaattatatgaactcaagccgacgcgtgaacaaagtagtacgttacacgatcgcggcataaccggtaattccggagccagcctgcatgctaaaacctttagcatcgatggtaaaacggtgtttatcggctctttcaatttcgatccgcgtagtacattgctcaatactgaaatgggcttcgtgatagagagcgaaacgctggcacagttaattgataaacgctttattcagagccagtatgatgcggcctggcagctccgtctggacaggtggggacggatcaactgggttgatcgtcatgcaaagaaagagattattctcaaaaaagaacccgccaccagtttctggaagcgggttatggtcagactggcgagcatattgcccgtggaatggttattgtaaatgtggcttaacgggctggtgctttatcgttctcacgcttaacaaccggtttaccagagaacaaaaacttcagtaacgggatgcgcaaatgaatttcatacagaattatcgcaatccctactacaaatatcaggccacagagaaaaccaagccagttggaggtgatgtgcggtgtaatgtatgcgccgaaaaacagcgttaacgggtggtgaaccagatagataaacaggcttgcgttaacaaaataagtcacccgcgcactctggaagttaagcaaacggtggccaaaggagaagaccacattcaccatccacagaccgaggaccatggtgatcacgctctcggtttcgtacatccaggcatcgccactgccatagcgctggttgagtaaataagcgacaaacgccaatgctgctgcaagggtacagccacgagacggcgtggtaaacaaggctttaagatgagggaaaatgaaagccagtgcgccgaggataaagaacggcaaataaaacagcgtttgcatgacaataaaattgaacatgccattactcagaatgggcggatacacaataaaaatcgttcttcttattaccgcataaccgatgccgaggcataaaaaaatcacgcttagttttaccatgctgaattttttattcgttttatcagaattttctaaattatttctgatgcgcttaaatatccatacgcacagcgtcgtcatgaccactaacaccagtaaaaaccacaggtgacttattaattcccaggccaacgtattatatttgtcatacaaactcagcccaggccaactttccgcttttcctttgacatattgcagcataataaattgcggtaatgtcagtagggggatggctgttaacatcgggatacctacacgttcgacacgtactttccaccattttttcaagggatagcgtaaaaaaagcatgtaggaaaagtagccggatataacgaaaaatacctgcatgcggaagctgtggatgaagtcattaaaaagggtcagccacaaactactttcggcgctattcacatgccatgtatggctgctatagattaaagaaatatgaaaaggtatccctaacaacatcagccaggcgcggatggagtcgaggaaatattcacgttgcgcgggtactgggttcatatatggttaactaatctcggatttttcgtcttatccctgtcgggttatgcctttaggcttgttgccatagtgacaccgacctgaccgcgccaggcgcaggcttcaaggtttttatgcatagcatcatcgctaccactaaccagaatggaagcgtctgtaagacggttgataaataaatttgctggcaaaccctacacgaagtcgatgcttctgtctttaggagaagcacggaaagtgaaaacggttgcaatcaggtgcttaatccatgagccagcgtgctgaacgataccgggattctgttgtcggaatggctggttatccattaaaatagatcggatcgatataagcacacaaagggggaagtgcttactaattatgaaacataaactacaaatgatgaaaatgcgttggttgagtgctgcagtaatgttaaccctgtatacatctagtagctgggctttcagtattgatgatgtcgcaaagcaagctcaatctttagccgggaaaggctacgagacgcccaaaagcaacttgccctccgttttccgcgatatgaaatacgcggactatcagcagatccagtttaatcatgacaaagcgtactggaacaatctgaagaccccattcaaactcgagttctaccatcagggtatgtacttcgataccccggtcaaaataaatgaagtgactgccaccgcagtcaaacgaatcaaatacagcccggattatttcactttcggcgatgttcagcatgacaaagatacggtaaaagaccttggctttgccggttttaaagtgctttacccgatcaacagcaaagataaaaacgatgaaatcgtcagcatgctcggggccagctatttccgcgtgattggtgcaggtcaggtttatggcctttctgcccgcggcctggcaattgataccgccttgccaagcggtgaagaatttccgcgcttcaaagagttctggatcgagcgtccaaaaccgactgataaacgtttaaccatctatgcattgcttgacagcccgcgtgcgacaggtgcttacaaattcgtggttatgccagggcgtgacacggttgtggatgtgcagagcaaaatctatctgcgcgataaagtcggcaaactgggggttgcaccgttaaccagtatgttcctgtttgggccgaaccaaccgagccctgcaaataactatcgtccggagttgcacgactctaacggtctctctatccatgccggtaatggcgaatggatctggcgtccgttgaataacccgaaacatttagcggtcagcagcttctccatggaaaacccgcaaggctttggtctgttgcagcgcggtcgtgatttctcccgctttgaagatctcgatgatcgttacgatctccgtccaagcgcatgggtgactccgaaaggggagtggggtaaaggcagcgttgagctggtggaaattccaaccaacgatgaaaccaacgataacatcgtcgcttactggacgccggatcagctgccggagccgggtaaagagatgaactttaaatacaccatcaccttcagccgtgatgaagacaaactgcatgcgccagataacgcatgggtgcaacaaacgcgtcgtagtacgggggatgtgaagcagagcaacctgattcgccagcctgacggtactatcgcctttgtggtcgattttaccggcgcagagatgaaaaaactgccagaggataccccggtcacagcgcaaaccagcattggtgataatggtgagatagttgaaagcacggtgcgctataacccggttaccaaaggctggcgtctggtgatgcgtgtgaaagtgaaagatgccaagaaaaccactgaaatgcgtgctgcgctggtgaatgccgatcagacgttgagtgaaacctggagctaccagttacctgccaatgaataagacaactgagtacattgccgaagactgatatccgcgccgttcatcaggcgctggatgccgaacaccgcacctgggcgcgggaggatgattccccgcaaggctcggtaaaggcgcgtctggaacaagcctggccagattcacttgctgatggacagttaattaaagacgacgaagggcgcgatcagctgaaggcgatgccagaagcaaaacgctcctcgatgtttcccgacccgtggcgtaccaacccggtaggccgtttctgggatcgcctgcgtggacgcgatgtcacgccgcgctatctggctcgtttgaccaaagaagagcaggagagcgagcaaaagtggcgtaccgtcggtaccatccgccgttacattctgttgatcctgacgctcgcgcaaactgtcgtcgcgacctggtatatgaagaccattcttccttatcagggttgggcgctgattaatcctatggatatggttggtcaggatttgtgggtttcctttatgcagcttctgccttatatgctgcaaaccggtatcctgatcctctttgcggtactgttctgttgggtgtccgccggattctggacggcgttaatgggcttcctgcaactgcttattggtcgcgataaatacagtatatctgcgtcaacagttggcgatgaaccattaaacccggagcatcgcacggcgttgatcatgcctatctgtaacgaagacgtgaaccgtgtttttgctggcctgcgtgcaacgtgggaatcagtaaaagccaccgggaatgccaaacactttgatgtctacattcttagtgacagttataacccggatatctgcgtcgcagagcaaaaagcctggatggagcttatcgctgaagtcggtggcgaaggtcagattttctatcgccgccgccgtcgccgcgtgaagcgtaaaagcggtaatatcgatgacttctgccgtcgctggggcagccagtacagctacatggtggtgctggatgctgactcggtaatgaccggtgattgtttgtgcgggctggtgcgcctgatggaagccaacccgaacgccgggatcattcagtcgtcgccgaaagcgtccggtatggatacgctgtatgcgcgctgtcagcagttcgcgacccgcgtgtatgggccactgtttacagccggtttgcacttctggcaacttggcgagtcgcactactggggacataacgcgattatccgcgtgaaaccgtttatcgagcactgcgcactggctccgctgccgggcgaaggttcctttgccggttcaatcctgtcacatgacttcgtggaagcggcgttgatgcgccgtgcaggttggggggtctggattgcttacgatctcccgggttcttatgaagaattgccgcctaacttgcttgatgagctaaaacgtgaccgccgatggtgccacggtaacctgatgaacttccgtctgttcctggtgaagggtatgcacccggttcaccgtgcggtgttcctgacgggcgtgatgtcttatctctccgctccgctgtggtttatgttcctcgcgctctctactgcattgcaggtagtgcatgcgttgaccgaaccgcaatacttcctgcaaccacggcagttgttcccagtgtggccgcagtggcgtcctgagctggcgattgcactttttgcttcgaccatggtgctgttgttcctgccgaagttattgagcattttgcttatctggtgcaaaggaacgaaagaatacggcggcttctggcgcgttacattatcgttgctgctggaagtgcttttttccgtgctgctggctccggtacgcatgctgttccatacggtcttcgttgtcagcgcgttccttggctgggaagtggtgtggaattcaccgcagcgtgatgatgactccacttcctggggtgaagcgttcaaacgccacggctcacagctgctgttagggttagtgtgggctgttgggatggcgtggctggatctgcgtttcctgttctggctggcaccgattgtcttctcgttgatcctgtcaccgtttgtttcggtgatttccagccgtgccaccgttggtctgcgcaccaaacgctggaaactgttcctgatcccggaagagtattcgccgccgcaggtgctggttgataccgatcggttccttgagatgaatcgtcaacgctcccttgatgatggctttatgcacgcagtgtttaacccgtcatttaacgctctggcaaccgcaatggcgaccgcgcgtcaccgcgccagtaaggtgctggaaatcgcccgtgaccgccacgttgaacaggcgctgaacgagacgccagagaagctgaatcgcgatcgtcgcctggtgctgctaagcgatccggtgacgatggcccgtctgcatttccgtgtctggaattccccggagagatattcttcatgggtgagttattacgaagggataaagctcaatccactggcattgcgtaaaccggatgcggcttcgcaataaaaacgtagttgcctgatgcgctacgcttatcaggcctacatcgttcctgcaatttattgattttgcaagactttgtgggtcggataaggcgttcacgccgcatccggcaaaaacaacgagccaataaaaataccggcgttatgccggtatttttttacgaaagaggtatcaaatgcgtttaattgtggtgagcatcatggtgaccttgctgagtggctgtggcagcattattagtcgcactataccggggcaggggcatggcaaccaatattatcccggtgtgcaatgggatgtgcgtgactccgcctggcgttatgtcacgatccttgatctgccattctctctggtttttgatactttactgctgccgatcgacattcatcatggcccgtatgagtgattaacgttcatcccactcatcagctgctgcgcgtccttcctcggtatccagcggtggctcaagctgaaattccccctcgtcccattcatgtaatgtattctcttcctgccactcctggcgtatctctatctcatcatagtcgccatcaaaaacactttgcgcggcttcaccgctaagcataggtaaacattcaccttcttccccttcgtcggcaaaaaactcaacttgccacatgatgtcgccgtcctgcaaaacgtatttttgggcattgaactgttgcacattcgcatcttcggcgtcgatgccggggttgtctgcaagaaattcttcgcgtgcagcgtcaatggcttcttcaagcgttgcgtacatggtcatcacgattctccctttgagttgatgaggtttcagggaaaaggatagctgattctccgcttttgcaagtatgaaaggcgaaaaatcagttgcttacctggggtattcgacgacgacgtagactgttccaactatagactgcgttgaataacactacgccagcggtgacgagaaataccgctctgaaaccgtagttcgcactaatcgctgctcccatcaatggtccggtaacgttgccaatatcacgaaagctttggttatagctgaagatacgcccggcgatctggttgctgctgttgtaaaccaacagtgtctgtacggcggggagtagtgcaccatcggcggcaccgagcaaaaaacgtaaaatcccaagttgcaatggcgtctgaacgtaagacattgggatcaacagcagtacagaaaagatcagcgctgtaatcaggatcttttcgggtccgattcgatcgccaagtttgccgagtcgtggtgcacttagcagagccgccacgcctggcacgctggcgatcatgccactgataaaggcgacgttactgacgttacccgccagttcgcggacatacagcgtcagaatgggggcaatactgcccgtcgccacctggatgattaacgtagtgacaaacaggctgagtaccagtttcgggtttttaagacttgtcaccacttcccgcatgtgcagcatctcttttttgctgaccggctggaatttttctctgatgcaaaacagggtgacgaaaaagcagagtatgagcacactggcggtaataaagaataccggacgtaagccgtagctatcggcgagcaggccgccagccattgggccgagcaacgcaccactaacgccgcctgtggagagcgtacccagcgcccagccgcttttattacgcggtacttgtgtggcgataagagcattagcgttggggacaaatccgccaagtaacccaagaagcgcccgcaggatcaaaaactgccagatattttgtgccagccccatcaacaccatcacgatgcccatgccgagggcagagcgtaatagcatgagttttcggcctttacggtcggcgagtccaccccaaaacggactggcgatggcgctaaataaaaatgtaatgctgaagacaataccggaccacatattcagggcggagtgaccggtaacgccaagctgctcaacgtagaggggtaagaagggcattaccagactgaaggcggcaccggtaagaaaacagcctagccaggcgacgatcaggtttcgtttccagtttataggggtgtcattttcacagggactcatagcaatccgctgttggtgcgccaggcgcggtgaacataagaagaaaagataagcacactaattatgcgcccgacttccagggggcgcaatccagagagcttttatcgctaaatcagggggatttgctgtggtaatgccggatgccattctgaagcatccggcatgggagatttaatagcgactaggaacgccttccgggcgtgttttaaagcgacggtgtaaccacatatactgctctggtgccatcatgatgcatttttcgaccactttgttcatccacgcggcggtagtttcggcatcatccagtggcggagaacactctggcggcagcataatcaattgataccctttgccatctggcttacggcgtggaacgaagggcaccagacatgcgccggacatccgtgccagcatccaggttccggtcgtggtcgcagcctgctcaacggcaaacaacgggacgaaaacgctactgcgcgggccgtaatcatgatccggtgcgtaccagaccacttcgccttttttcagggctttaatcatgccttttaaatctttgcggtcgagcatgcttttattactgcgcaaacggccccaggtttgtagccagtcaatcagtggattatcgttcgggcgataaacgccaatacccggttcctgcataccaaactgccgcgcacccagctccagtgtcagaaaatggatgccaactaacaggatgccgcgtttttgcgcctgcacgtcacgaatgtgttccatgccgatcacttccgtccagcgggcgattcggcggtccggccagaaccacgccatgccggtttccatcaggcccatgccaacggattcgaaattcttcaccaccattttacggcgttcttgttcgctcatttccgggaagcacagttccaggttgcgatgcacaatttttgcgcgtcgtttcataaaacgtaacgccagttttcctaatccacaaccgaggcggtagataaccgggtagggcaattgcacgactaaccaaagtacgccaatacccaaccaggttaaccaataacgcggatgaagcagtgcggtggagaacttgggtagattcgtcatatcaatcctgtttttcaacctattcgggcaattgtatgtattgtcgcattttttcgcccgcaaccaaaatttgtggctgaagactgggcgaaattgccgcgcttgtaaataacaaataatttttaatgcgcaaatgtagcgtaaaatgtgtggatgttaattatcgataattgctatatcatgccgcggatttttactttcccatctcgcaggaaccgtacaccatgccagtgttacacaaccgcatttccaacgacgcgctaaaagccaaaatgttggctgagagcgaaccgcgaaccaccattagcttttacaagtatttccacatcgccgatcctaaggcgacccgtgacgctttatatcagctgtttaccgcgctgaatgtttttgggcgagtgtatctggcgcatgagggcattaacgcgcaaatcagcgtacctgcgagcaatgttgaaacatttcgcgcgcagctctatgccttcgacccggctttagagggtttacgcctgaatatcgcgttggatgatgacgggaaatccttctgggtactgcgcatgaaggtacgcgatcgcattgttgccgacggtattgacgatcctcactttgatgccagcaatgttggtgagtatctgcaagcggcggaagtgaacgccatgcttgacgatcccgatgcactatttatcgacatgcgtaaccactatgagtatgaagtggggcactttgaaaacgcgctcgaaattccggcagataccttccgtgagcagctgccaaaagcagtcgagatgatgcaggcacataaagataaaaaaatcgtcatgtactgcaccggcggcattcgttgtgaaaaggccagtgcctggatgaaacataacggattcaacaaagtctggcatatcgagggcggaattattgaatacgcccgtaaggcgcgcgagcagggcttgccggtgcgttttattggcaaaaattttgtttttgacgagcggatgggcgaacgtataagcgatgagattatcgcgcattgccaccagtgcggcgcgccgtgcgacagccataccaactgtaaaaatgatggctgccacctgctgtttattcagtgtccagtatgcgcggaaaaatacaaaggttgttgtagtgagatttgctgcgaagaaagcgcgttaccgccagaagaacagcgacgccgtcgggcaggacgtgaaaatggcaataagatctttaataagtctcgtggacgtctgaatacaacactgtgcattcctgatccaacagaataaatatcattgccggatgcgtgccatccggcaacatttcacgcttacttctgctgtacgccttccacactaataatcagatccacttcctgagaagctggacctaaatctgtcttgatattgaagtccttgagcttaattttgccttcggcctcgaagcctgcacgtttaccaccccatgggtcgtcgccctgaccaattaatttcgcttccagcgtgacgggtttggttacgccattcagcgtcagatcgccggtaatatccagttcgtcaccgtctttcttcacgctggtggaggtgaatgttgcctgtggatattttgcggtattgaggaaatctgcactgcgaagatgtttatcgcgttcggcgtgattagtatcgacgctggtggtgttaattgtcacattcactttatcggcagccggatttttttcgtcaaaggtaaaagtaccgtcgaaatctttaaaggtgccgtataaccagctatagccaaggtgctggatgcggaaattaacaaaggcgtgctgaccttctttgtcaattttgtaatcggcggcaaccgcactaccggcagagaacatcagggacgcgaaggttaaaccaagcaggctttttttcattttttatactccatagtcagaactgctctttcccagcatgcgcttcagagtgtcgtctttatcgatgaaatgatgcttcagggccataaatccgtgcataacggacagtactacgacgctccacgcgagccaaaaatgcagggcaccggcaaagtctgcctgtgcgccagcgtcggcaagggtcgcggggacgtcaaaccagccaaaaacgctgatcggtttaccatcggcagtactgatcagatagccgctgatgccgatggcgaaaagcaataggtacaatgcgagatgtccagctcttgcggcaagacgagtcatggggctataactcggcagcggacccggcggtggagatatgacacgccacagaacgcgaataaccagccccatcattaacaaaataccgatgcttttatgcagttcgggtgctttgtgataccagccatcgtaataactgagcgtgaccatccacagacctaaagcaaacatgccgtagacaataattgcgcttagccaatggaaggccgcagatataacaccatagcgttcaggggtatttgtgaaactcataagtgcatccaaaacgaatttgcgagagaaagaaaatggcgtgtcggagaatgaattgcaacacaaaaataacaaattgaatgatatttatttttatttcaataattttgaattaataatgaaagaatcttcataagtttagtgggttcagcatcagagatgtctggtgagtgctgtagaagcaggaataatctcattcaatttttcacgctaaatgaaagggagattaaatatttgtcagtttatgtcagtgcggaaaattaaaaataaaacacatagatcagatccataattgccaacaatccccagagaaaaagataaagcatcagatgctcgcgaatattattgatgagatagtgcaacagccgacgcattaaatactcctgtaaaaacggcctcattctggaggccgtaatgatgattattggaagcgggaaagcctgaatggcgtcaaatcaaaatcgctttttttgtcttgcgcaaaatcggcagctatttcccctaaaacactcgcaaatttaaaaccgtgcccactcaggccggtaatgagcagtgtattatcgtggccgggtagggtatcgataataaaatcttcgtcagggctattatcataggtgcaggcagcgccgtacaggcagcaaccgatacccggcaatacattgcgcaagaacgggaaggcttcactcccatcactggccacttccgcaaacggaacacgttcatccgcactatggataacctggcctccgttatgtttgccaatcttcaacgcgtcgttttctgccggaaaaccataatattgatcgccattgggcagttcaccggtaaacgccgggaatttattcttcacgctatagcggccatcggcctgataccaggcaaatactttgcgtacgggctggacaggcagctccgggagcaggtcttttacccatgttcccgcgcagacaatcgcttttttcgcctgatactcaccgtcagccgtttcaatagttacgccatcatcgtcatgacgaattgcggtgaccgggcagttgaacagttgcgcacagcccgcttccttcgccagttggatccaggttttaatcgccagttcgctgcgcaaaaaaccggaatcagtttcaaataagccgatgtagttgtccgggacgcgtatttccggccagcgggccataatcccttgcgcatcgagcttttcaacgttgagttgccattgttcggcgctgtgggcgacgttggcgagaaatgtggaatcagccgggccaaggttaatgacgccagagcgtacaaaaatgggatcttcttcgttgtggcgggagagttcatcccacagcgtttgcgcgcggaggaccagcgggacatacttttcgccttcaccataagcatggcgaattaatcgcgtatcgccgtggtggctgccgtgttgatgcggtggcatatgggcgtcggtcattagcacgtttaaaccggcgcgggttgcataatacccggcggcagcgcctacggaaccgctgccaataatgatgagatcgtatttcatttttttctctctgctctcatggtttaagcagagtaattaactgaatgcagatatacaacccagaaatggtaaaggcaccggtgaggtgccttttgggtggatggtcatgtcatgttaatgacgccgatactcgtttacctggaaatcaccggattcaattttggcgattcctgcttctaatatgctaataaattgtctggcaacatcagtggttaaccagagcgtctgaccaacttcagtcccttcctgctcggacttatttggggtctggtagtgcaaacgcaacatcagcgcatcatagctatcaacggtgctgatgtcccaccctacgagcggatgagtctgaatgacttcattatttttttccatcatggccccctaattcgtgttactagacaacgttattcgaggttcaatgcgtttttatctgaagcaacttcagtataccaataagtaagggtattcaccgaatttttaaagggggaaacagataaatttctgcttttaagatttatatgaacaataaaacagcatgtcattcatatttttttagcatattgtgcaattattttgaggaagtgtagaaattttgtactcaaaattcgtaagtaaaataaaaaagccggggcgacccggcaaaaaaaatcactgcatattattcgctgacaaaccagtcatcggcgctttcccacgtttcctggagaatttcactaatgcgctgtttatcttcttttgtcgcgccaataacgcttaaattattcgctgcggcataacgtacgcttacgtggccttcattatcaggaaacgcatactgaatacggcgggaaagttcgccagccagggcgtcaatagccccagctggcaatggagaagttttcgctatggtgacttcaattcgcataatagccccctgttgaatatactggttatttatacaggtaaaataacctaatgacaacaggaagctacgatttttattgtttaacggaccagcgtaccgtttccccggcgaggaatggcaccagcgtgtcatcagtcagtgcgatgctttcagcaacctgttgctcttcacgtaccagttcgatgaatgtgtcgttgaccggcaacccatagaactgcgggccgtttacagaacagaatgcttcaaagtgctgcaaagcattcatttcttcaaagacggtagcgtaactgcccagcgcggttggggcgttgaagcagcccgcgcagccgcaactgctctctttgcgatgacgtgcatgtggcgcagaatccgtaccgaggaatactcgattaaaaccgctggcgaccagttcacgcaatgcctgttggtgaatattacgtttgaggatgggtagacaatacaggtgcggacgcacgcctccaaccagcatatggttgcggttaaacatcagatgctgcggagtgatggtggcagccagccgttcatttccgtcacggacatagtcggcagcatctttggtggtgatgtgctcaaaaacgactttcagcgcagtcaggcgctggcgcagaggttccatcacgctttctataaagcgcgcttcacgatcaaaaatgtcgatatctgcatgtgtcacttcaccatgcaccagtagcggcataccgattttttccatgcgctcaagtaccggcatgattgcgtcaatactcgtcacgccgtggctggagttagtggttgcgtttgccgggtaaagttttgcagcggtgaacacgccttcgttaaatccgcgctccagctcattaggatccaggctatctgttaaataacaggtcatcaatggggtgaaatcgtgcccggcaggtacggcgtcaagaatacgctggcgatacgccacggcagcctcaacggtggtcacgggcggagccagattgggcattacgatagcccgtccataaatttcgctggtatatggcacgacagtttttaacatgtcgccatcgcggaggtgaaggtgccagtcgtctgggcggcggatctttaatacctgggatggtgcagtcattaatctctatgctccggctgaagggatgtttttgccggacacaaaggataagcggaaacgttttcctttgcacgaaaaataaagggcgcgaatgcgccctcgtgattaatcagtaaatggaatgacaatttcgcctggcttcacttcaatgcctttcgccagttttttcgccattgcttcgccctggctgccatcttcgcgcaggacgtaagcaggttgctggttaaagtaattgcgtaatgcctggttcaaatagggaagcaacgtttgcatcaccgtttgcattttttccggttgtaccgtcgcatcgaccacttccatctctttcaggaagatcgcacctttttctttatcaaacacgggcagcgctttcagcttcagtttcatggtcgctttctgactaccgaacagggagttcatgtccagattggcgtctccggttagggtaaccttattcggctcttcgcgaccaatttggctggtcaggtttgtcagaacaatatgggcgtcagccacgccgggtaaaccgatatctttactgaaattattatgtttcgcaaggctctggttaatttcttgttcggtgatggtgtattgggtgagttgattacagccaacgagcaggccactgacgatcaatgcagcggcaaataaaaacttgttcatggtagtcctcgacatgaaatctgcgtcaatatcctgacacaacgcagcatgtgtcaccagcgataaactcgccagcagaaaaaactgaaaacggcggcaacccgcgaatacaggctgccgcggcgggtcaggattaaatcgccatactacttaacaaattgatttgtgtctgtttcgccatattatcgcggtaatcagcaacgcggcttggccagttaattccggctaccagcgtcagattacgcagtagcgggaatagctgaatatcatcttcgctaagttcgccattcacggcgttcggtttgacgatcagtttgtccagcgcacgtaaatcatcgctgatattcttaatcagaccgtcagagtgggccagcaggtcggcaaaattacccgcgctggcctctttcttgtcgacgaaatatttgcgcgcggcgggagtagaaaactcatcaaatgcgcttttggcaaaacgcggcaacagcagtttgttggcgtagccattgaccttgcgcagccactcttcaatggcaggggaacgtttgccggtcagtaacggtttgccgtcgagtttatcgacatagtgaacgatgtccatgctttctggcatatagcggctgtcatctttttgcagaatgggaacctgtttttgaccgaccatccgggtgggtgtttctgcgtcgtcgttgagcagaacatgtaattcgacggggatatttttcaggccgaaaatcatgcgggctttgaggcagtaagggcagtgatcgtaaatgtatagcttcacgtgactcctccatttggctgtcagttcactttcagtatgaaggagtcaggggggagtatcaaatcaggcgtcgcgttcaagcaaacgacgcgcggcgcgtttctggctaaactgccaacccagcgcaaggaaagtgaagatgccaataatgcccagcatcatccacggaagctctggctggtgcgcgcttttgcccaggtcaaacagccagccgccaccgatataaccaatagcgccgccaatcgccagacccagacggctaaaccccatatagctgccgcgagctcttgcgtccgccaggctagcacttaaggtttcacgcgcaggctcggcaatgatgctcccgatataaaacagacaaatcagggtgaaaagttgttgcaggccgctgaccatgcccaccggcatcatgcttaaactcattatcaacagcccagccatcaaccggtgttccagacgaaaatgcttttcactccagcgggcgatagggtagagcaacgttaagctcagacacgcttcaatggcatacatccatttaacggcagagggcgcgcagccacgtcgttgaccataattggcagcatcagcatcacttgtacagccagcatgtagtaacccgccagcgtcagaacataggtgacaaaacgcttgtcacgcatcacgcgggtcatgccttcgcgaacgggcgtgcgtacggtggagagtttccatgctggtaacaaccacgcattgaacgccgcacatagcacaaatagaactgcccctgtggcgcagaccaggcgaaagtcgtattgcaacagccagctccccaacaatgcgccaatgaccgcaccggcactgtcctgcatcatcaacaggctgaaaaaacgaccacgctgctgtggacggattaatttcaccaccagcgcgctacgcggcggatcaaacaacgtgccaccgagtccgctgagcaggcaactaaaccacaatagccacggttcgtgggcgatacccattgtggcgaatccggcggcgcgcatcagcataccggtaacaatcatcggtttggcaccaaagcggtcggcaattgcaccgccgaaaatacccagaccttgctgaataaattggcgtagaccgagagcaataccgaccatgacggcggcccagcccatttgatcaacgaagcggatagagatcagcgggaagacaacaaagaaccccagcacgaccagcatattatcgatgagcaggaaatatttacccaggttcctcgcctggctcacgcgggacatttcccctcccgggaaataaaagatgagcactttctattctgcattgccgctaagacttttcccatcacttcggggacaatatttttttatcaaaacgtcgctttgatagagagtttttatcaaatatgtgaataatgcagaaaatggcattttggacttttcacagggtctggttgcgcaggtatagtaatacttacagcgtattaaagacgttacgggaaggagtaggtatagaatgtttggctatcgcagtaacgtgccaaaagtgcgcttaaccacagaccgactggtcgtgcgtctggtgcatgatcgtgatgcctggcgtcttgcggattattacgcagagaatcgccatttcctcaagccctgggagccagtgcgcgacgaaagccactgttatccaagtggctggcaggccaggctggggatgattaacgaatttcataaacaaggtagtgctttctactttggcttattcgacccggacgaaaaagagattattggcgttgccaatttttccaatgttgttcgtggctcttttcatgcctgctatctcggttatagcattgggcaaaaatggcagggcaaaggactcatgtttgaagccctgaccgcagccattcgttatatgcagcgcacccaacatattcatcgcattatggctaattatatgccgcacaataaacgcagcggtgatttactggcgcgactgggttttgaaaaagaaggctatgcgaaagactatctgttgattgatggacaatggcgcgatcacgtactgacggcattaactaccccagactggacgcccggccgctaaggagaatctcatgaaatatcaacttactgcccttgaagctcgcgtgattggttgcttgctggaaaagcaggtgaccacgccggagcaatacccgctcagtgtcaatggtgtagtcacggcctgtaatcagaaaacgaaccgtgaaccggtcatgaatctgagtgaatccgaagtgcaggaacagctggataatctggtcaaacgtcattatctacgcacagtgagcggttttggtaatcgggtcaccaaatatgagcaacgtttttgtaatagtgaatttggcgatctgaaactgagcgcagcggaagtggcgttaatcaccacgttgttattgcgtggtgcccagacgccaggtgaactgcgcagccgcgccgcgcgaatgtatgaattcagcgatatggcggaagtggagagcacgctggaacaactggcaaatcgcgaagatggtccttttgtggtgcgtctggcccgcgaaccgggtaaacgcgaaaaccgctacatgcatcttttcagtggtgaggttgaagatcagccggcggtgacggatatgagcaacgcggttgacggtgatttacaggcccgcgtcgaagccctggaaatcgaagtggcagaactgaaacagcgtcttgatagcttgctggcccatctgggagattaaagtgaaaaaattacgtatcggcgtagtgggattaggtggcattgcgcaaaaagcgtggttaccggtgctggcggcagcgtctgactggacgttacaaggagcctggagccctacgcgcgcgaaagccctgccaatttgtgaaagctggcgcattccttatgccgatagcttatccagccttgccgccagttgcgatgcggtttttgtgcattccagcaccgccagccactttgacgtggtcagtacgttactcaatgcgggggtacatgtctgtgtcgataaaccgctggcagaaaatctgcgcgatgctgaacggctggtggaactggcggcgcggaaaaaactgacgttgatggtcggttttaaccgtcgtttcgcaccactctacggtgagttaaaaacgcaactcgccaccgcagccagcctaagaatggataaacatcgtagcaatagcgtcgggccacacgatctttatttcacgttgctggatgattatctgcatgtggtggataccgcgctgtggttgagcggcggcaaagcctctctggatggcggtacgctactgactaacgacgctggcgaaatgctgtttgccgagcaccattttagcgctggtcctttgcagatcaccacctgtatgcatcgccgtgccggaagtcagcgtgaaaccgtgcaggccgtgactgacggtgcgctcatcgacattacggatatgcgcgaatggcgtgaggagcgcgggcagggcgtagtgcataaaccgattcctggttggcagagtacgcttgagcaacgtgggtttgtcggctgtgcgcggcacttcattgaatgtgtgcaaaaccagacagttccgcaaaccgccggcgaacaggccgtgctggcgcaacgtatcgttgacaagatctggcgcgatgcgatgagtgaataaaccctgtaacatctggcggtagcaattcaccataatccaggtagactattcgcctctttcagcgcctgccttgcaggcgttttgcccgtgggtctggattagaacaccgatgaatttattaaaaagcctggccgccgtcagcagcatgaccatgtttagccgtgtgcttggcttcgcacgagacgcaattgtcgccagaatctttggcgcagggatggcaaccgacgcctttttcgtcgcttttaaacttcctaacttgttacgccgtatctttgccgaaggggcattttcccaggcatttgtaccgattctggcggaatataaaagtaagcagggtgaagacgccacgcgggtctttgtctcttatgtttctggcctgctgacacttgcgctggcggttgtgacggtcgctggcatgctcgccgcaccgtgggtgatcatggtgaccgcgccaggcttcgctgacacagctgacaaatttgccctgaccagccagctactaaagattacctttccctatatcttgctgatctccctggcgagcctggtgggagcgattctgaatacgtggaaccgcttcagcattccggcgtttgctccaacactgcttaacatcagcatgattggtttcgcgctgtttgccgcaccgtactttaacccaccggtgctggcgctggcgtgggctgttacggtcggcggcgtcctgcagctggtgtatcagctaccgcacctgaagaagatcggcatgctggtcctgccgcgcattaacttccacgatgccggagcaatgcgcgtggtgaaacagatgggaccggcgatccttggcgtctctgtgagccagatctccttaatcatcaacaccatttttgccagctttcttgcttccggtagcgtgtcttggatgtattacgccgaccgcttaatggagtttccgtccggtgtgctgggcgtggcgcttggcaccattttgctgccgagcctgagcaaaagttttgccagtggcaatcatgatgaatacaaccgtttgatggactgggggttgcgtctttgtttcctgttggcgctgccgagtgcggttgcgttgggcattctttccggtccgttgaccgttagcctgttccagtacggtaaatttaccgcgtttgatgcgctgatgacccagcgggcgttaattgcctacagcgtgggtttgattggcctgattgtagtgaaagtgttggctcctggcttttattcccgccaggacattaaaacgccagtgaaaattgccatcgttacgctgattttaacgcaattgatgaacctggcgtttattggtccgttgaaacatgccgggctgagtctttctattggtctggcggcgtgtctgaatgctagcctgctttactggcagttgcgtaagcagaaaatctttaccccgcaacccggctggatggcgtttctgttgcgtctggtggtggcggtactggtgatgtctggcgtgcttttaggtatgttacatatcatgccggagtggagtttgggtaccatgccctggcgtttactgcgtttaatggcggtcgtgctggcggggattgccgcgtacttcgctgcactggcggtactgggcttcaaagttaaagaatttgcccgccggacggtgtaacaatgcattccggcctgcagtgttcgctttaaaacatatcatgaaactgggtatgttttgtctgcctgctctgggatcgctggggcgggcatttttttgcctattttgcattgttggttagcaaggatgccattcgatgaattttaatatgttgattcaaagatgaaataaaaaagccctggcagttaccagggcttgattactttgagctaattattactcaacaggttgcggacgcgcaggagcggcagaggcatgatgtgttgccgtatgaccacctgcggcacctttaccttcgaaggcaaaagtagggcgctgccagtcactgtgacgcggtgcctccggaacatattccggtgctggagcgcgcgtcattggcgcggtagcgtggttatgctcaacggtgacctcaggttcgaccgcagctaccgtttcaacttctgctgcgacttcagcgactactggcgcggcaggttgagcaacaacttcaggttcagcaactacaacctcagcagtttcgacaacttcttcaatatctgccgtctcttcctgcggttcaaccaccggttctgcttgttctgcaacttcctgggctacggcaacatcagactcggtaatcacctgcggctgttcagttaccgcggcagcgatcacttcaggatgcgtcgtttcaaccacttccggttgcggttcggcaacctgaacgggggcttctacgacaccggccacttcttcaacaactggcgcgctaacaaccggttcgatagcggcggcgacagggacctcagtcaccatcggctgcacatgtacttcttcctgttcgcgctgctcttcaacctgtacatcttgcggacgtacaattggatagcggatccagactttgccagaggccagttccggagacgcgcacgctacggtcaacggcattgggctctgggttggataacgctcgtcacgatagcgacgacgacgctgaccacttacgcgcaggtgacgagggctgcggcgagaacgacgcggcatgccaccgttgtcacggttatcagcattgttctcttcttgctgttctggtgcagtttgcgctacgactggcagcgggactttcaccagttctgtgcgtggagctggcgcttcctgaacaattggttcggcagcgacagtttcttcaaccaccggtgcgactaccgcttcttcggctacgctttgctcgtaacgcactttctgattgagctgacgctgtttacgacgcggctgaaccggacgtacacgttcttcctgttcggtttcctgaacagattgctcttcaacattcagcgccttcgcttcttgttgcgcctgacgtttatcatcattacggcggcggctacgttcacgacgcggcgcttgctgctcgtcggcggtacgcgctttttccgttacctcagcctgctgacggctctcacgcgtctcggcagtctgctgctgtgcctggcgacgattacgacggttttcttcgcgattatcgctgccttcagtacgttcactacgggtgtcgcggcgctcattacggtcacggcggttgttctgacgaggcttgcgacgatcctgttgacgttccggtttcgcttctgctttcggtgctggttgctcggtcggtttggtttcttcaccaccgctgaacagcgctttcagtgcgccgaagaagcggctcaacagcccaggttgtgcaggagctgctggtgttgccggtgcagctttcggtgctggagctacaacaggcgcggcaggttcagctggcgttggcgcaggcggcacatccggcatggcaaaggttgccagcgcaggttgttccggacgcttacgttcagcgaactcttcttcagacggcagcgccatcgcttcttcatgcagcttcggcagcatgtagcttaaggttggggtttcttcccctttacgcacgcgcagcacgtggtagtgcggggtttccatctgatcgtttggcacaattacacagcgcacaccgtcctgacgagtttcaatggcatttaccgcagaacgtttttcattcagcaggtaagaagcgattggcacaggaacaatggcgtgaacttcctgggtgttctctttcagcgcttcttcttcgatcagacgcagaatagagaggctcaggctttcgttgtcacgcacggtgccagtaccagaacaacgcggacaaacgtgatgactggattcacccagacttgggctcaggcgctgacgggacatttccagcaggccaaagcgagaaatatggctgatttgaatacgcgcacggtcctgacgcaccgcttcacgcagacggttttctaccgcacgctggtggcgtactggcgtcatgtcgatgaagtcgataacaatcaggccgccgaggtcacgcaggcgcagctgacgagcaatctcatcggcagcttcgaggttagtgttaaacgcggtttcttcgatatcgccgccgcgggtcgcgcgtgcggagttgatgtcgatggccgttaacgcttcggtgctgtcgataacaatggaaccaccagacggcagacgaacttcacgctggaaggcggactcgatctgactctcgatctggtagtggctgaacagcgggatctcgccggtgtacagtttgattttgctgctgaaatccgggcgacctaatgcagcgatatgctgacgtgccagttcgagcactttcgggttatcgataaggatttcgccgatgtcctgacgtaagtaatcgcggaatgcgcgaacgattacgttgctctcctgatgaatcaggaacggggccgggcggctttcagcggcttttttgatggcttcccagtgtttcagacggaagcttaaatcccattgcagcgcctcagcagatttgccgacgccagcggtgcgcacgataagccccatgccttccggcagttcaaggcttgccagtgcttcttttaattcggtacggtcgtcgccttcgatacggcgagaaatgccacccgcgcgcgggttgttcggcatcagaaccagatagctacccgccagactgataaaggtggttaatgccgcgcctttgttgccgcgctcttctttatcgatctgaacaatgacttcctgaccttcacgcaacacatctttaatgttgggacgaccatgagcactgtagttagcagggaaatattcgcgggcaatttcttttagtgggaggaaaccgtgacgttcagcgccgtaatcaacaaaagcagcttccagactcggttcaatgcgggtgattttacctttgtagatgtttgcctttttctgctcgtgccctggactttcgatatccaggtcatacagacgctgcccatctacaagggcaacgcgcaactcttcctgctgagttgcgttgattaacattcttttcatcgtaacttactcattattcttacattgacgactaagctgcgggcaaagtaacgcctttccgggtgtgaaccgatggcctcgtgtctagtcgcgtcgccaacctcacggttatcgtcagctcaaagaggcgcagagtgtgagttgcccgtttttcatgcggaaaaacagcgcaattatcaaagaaacagactgggtattactctccagaaatatttccatctaccggtaaggactgcaacccgcagcccgctaactgcctgaaagatcaatacgtcttacgccattgctgcgtggatgatcggtcgggcaaaatgggttattccgtaaaatttcttgttttaacaaggatggacacggaaacggcctcattattccactgcaagccttgttatagcaagatgacttttaccatttatcacccgcttactcacagttttttcacttcttgctggtgattggtttaataaccatcaataaagtgatcacgcagtgaagtaataaggtgcaaaagtaaatataagcatagaaaaatgagtggcgcgaatcctgttggctaattagaatcgccaaccatgaaaacagagactccatccgtaaaaattgttgctatcaccgctgacgaagcggggcaacgtatcgataactttttgcgtacccaattgaaaggcgtaccaaaaagtatgatttaccgtattttgcgtaaaggcgaagtgcgggtgaacaaaaaacgtattaagcctgaatataaactcgaagcgggtgatgaggtgcgtattccaccggttcgcgttgctgagcgggaagaagaggcggttagcccacatctgcaaaaggtggcggcgctggcggacgtcatcttatatgaagatgatcacatcctggtgctgaataaaccttccggtacggcggtacatggcggcagtggtttaagcttcggcgttattgaaggtttgcgggcgttgcgcccggaagcgcggttccttgaactggttcatcgtcttgaccgggacaccagtggtgttttgctggtagcgaaaaaacgcagcgcgttgcgttctctgcatgagcaattacgtgaaaaagggatgcaaaaagattacctggcgctggtgcgcggtcagtggcagagccatgtgaagagcgttcaagcaccgttactgaaaaatattctgcaaagcggcgaacgtatcgtgcgtgtgagtcaggaaggcaaaccgagcgaaacacgctttaaagtggaagaacgctatgcatttgccaccctggtgcgttgtagcccggtaacagggcgtactcaccagatccgtgtgcatacacaatatgcgggtcatccgattgcctttgacgatcgctacggtgaccgtgaatttgacaggcagctcactgaagcaggcacgggattaaatcgcctgttcctgcacgctgcagcgttgaagtttactcatccggggaccggtgaggtgatgcgtatcgaagctccgatggatgaaggtttgaagcgttgtttgcaaaagctgcgtaacgcgcgctaatacaagcatataaacctgataatgggcggttggcctgataaggcgtttacgccgcatcaggccgccagcaccgattgccggatgcgacgtaaccacatccggcgcaaaaaattatcccatcagcgggtttttcccttcccgacgtaacatctgacacagcgcgattagcggtaaaccaaccagcgtgttaggatcacgcccctctaaacgctcaaacagcgtaatgccaaatccttcactcttaaagctacccgcgcagtgcaggggatgctctttacgcacgtaattatcaatctccgcctcgctcaggtgacggaaatggacgtcaaaaggctccacttctgtttgcagatgcccattcgcgctattaaacaacgccagtccagtatagaaggtgacgatattgccgctggctttgcgtaattgcagacgggcattttcttccgttaacggtttaccggtgatttcgccatcaagaacacatacctggtcactaccaataattaaatgatccggataacgactcgccagagattgcgctttttcttgtgccagtcgaagcaccaactgtcgcggactttcgtcgctgcgtggggtttcgtcgacctctggtgctgcacattcaaaagagatttgcagtttttccagaagagcgcgacgccatgggctggtggaggctaaaataagtttaggcatatttttttccatcagatatagcgtattgatgatagccattttaaactatgcgcttcgttttgcaggttgatgtttgttatcagcactgaacgaaaataaagcagtaacccgcaatgtgtgcgaattattggcaaaaggcaaccacaggctgcctttttctttgactctatgacgttacaaagttaatatgcgcgccctatgcaaaaggtaaaattacccctgactctcgatccggttcgtacggctcaaaaacgccttgattaccagggtatctatacccctgatcaggttgagcgcgtcgccgaatccgtagtcagtgtggacagtgatgtggaatgctccatgagcttcgctatcgataaccaacgtctcgcagtgttaaacggcgatgcgaaggtgacggtaacgctcgagtgtcagcgttgcgggaagccgtttactcatcaggtctacacaacgtattgttttagtcctgtgcgtagtgacgaacaggctgaagcactgccggaagcgtatgaaccgattgaggttaacgaattcggtgaaatcgatctgcttgcaatggttgaagatgaaatcatcctcgccttgccggtagttccggtgcatgattctgaacactgtgaagtgtccgaagcggacatggtctttggtgaactgcctgaagaagcgcaaaagccaaacccatttgccgtattagccagcttaaagcgtaagtaattggtgctccccgttggatcggggataaaccgtaattgaggagtaaggtccatggccgtacaacagaataaaccaacccgttccaaacgtggcatgcgtcgttcccatgacgcgctgaccgcagtcaccagcctgtctgtagacaaaacttctggtgaaaaacacctgcgtcaccacatcactgccgacggttactaccgcggccgcaaggtcatcgctaagtaatcacgcatctgcgtgatgaagcttagtgaggattttccccaggcaactggggaaagaccaaaccgggcggcgacgataccttgacacgtctaaccctggcgttagatgtcatgggaggggattttggcccttccgtgacagtgcctgcagcattgcaggcactgaattctaatagccaactcactcttcttttagtcggcaattccgacgccatcacgccattacttgctaaagctgactttgaacaacgtagccgtctgcagattattcctgcgcagagtgttatcgccagtgatgcccggcctagccaagctatccgcgccagtcgtgggagtagtatgcgcgtggccctggagctggtgaaagaaggtcgagcgcaagcctgtgtcagtgccggtaataccggggcgctgatggggctggcaaaattattactcaagcccctggaggggattgagcgtccggcgctggtgacggtattaccacatcagcaaaagggcaaaacggtggtccttgacttaggggccaacgtcgattgtgacagcacaatgctggtgcaatttgccattatgggcagtgttctggctgaagaggtggtggaaattcccaatcctcgcgtggcgttgctcaatattggtgaagaagaagtaaagggtctcgacagtattcgggatgccagtgcggtgcttaaaacaatcccttctatcaattatatcggctatcttgaagccaatgagttgttaactggcaagacagatgtgctggtttgtgacggctttacaggaaatgtcacattaaagacgatggaaggtgttgtcaggatgttcctttctctgctgaaatctcagggtgaagggaaaaaacggagctggtggctactgttattaaagcgttggctacaaaagagcctgacgaggcgattcagtcacctcaaccccgaccagtataacggcgcctgtctgttaggattgcgcggcacggtgataaaaagtcatggtgcagccaatcagcgagcttttgcggtcgcgattgaacaggcagtgcaggcggtgcagcgacaagttcctcagcgaattgccgctcgcctggaatctgtatacccagctggttttgagctgctggacggtggcaaaagcggaactctgcggtaacaggacgctgccagcgaactcgcagtttgcaagtgacggtatataaccgaaaagtgactgagcgtacatgtatacgaagattattggtactggcagctatctgcccgaacaagtgcggacaaacgccgatttggaaaaaatggtggacacctctgacgagtggattgtcactcgtaccggtatccgcgaacgccacattgccgcgccaaacgaaaccgttagtaccatgggctttgaagcggcgacacgcgcaattgagatggcgggcattgagaaagaccagattggcctgatcgttgtggcaacgacttctgctacgcacgctttcccgagcgcagcttgtcagattcaaagcatgttgggcattaaaggttgcccggcatttgacgttgcagcagcctgcgcaggtttcacctatgcattaagcgtagccgatcaatacgtgaaatctggggcggtgaagtatgctctggtcgtcggttccgatgtactggcgcgcacctgcgatccaaccgatcgtgggactattattatttttggcgatggcgcgggcgctgcggtgctggctgcctctgaagagccgggaatcatttccacccatctgcatgccgacggtagttatggtgaattgctgacgctgccaaacgccgaccgcgtgaatccagagaatagtattcatctgacgatggcgggcaacgaagtcttcaaggttgcggtaacggaactggcgcacatcgttgatgagacgctggcggcgaataatcttgaccgttctcaactggactggctggttccgcatcaggctaacctgcgtattatcagtgcaacggcgaaaaaactcggtatgtctatggataatgtcgtggtgacgctggatcgccacggtaatacctctgcggcctctgtcccgtgcgcgctggatgaagctgtacgcgacgggcgcattaagccggggcagttggttctgcttgaagcctttggcggtggattcacctggggctccgcgctggttcgtttctaagataaggattaaaacatgacgcaatttgcatttgtgttccctggacagggttctcaaaccgttggaatgctggctgatatggcggcgagctatccaattgtcgaagaaacgtttgctgaagcttctgcggcgctgggctacgacctgtgggcgctgacccagcaggggccagctgaagaactgaataaaacctggcaaactcagcctgcgctgttgactgcatctgttgcgctgtatcgcgtatggcagcagcagggcggtaaagcaccggcaatgatggccggtcacagcctgggggaatactccgcgctggtttgcgctggtgtgattgatttcgctgatgcggtgcgtctggttgagatgcgcggcaagttcatgcaagaagccgtaccggaaggcacgggcgctatggcggcaatcatcggtctggatgatgcgtctattgcgaaagcgtgtgaagaagctgcagaaggtcaggtcgtttctccggtaaactttaactctccgggacaggtggttattgccggtcataaagaagcggttgagcgtgctggcgctgcctgtaaagcggcgggcgcaaaacgcgcgctgccgttaccagtgagcgtaccgtctcactgtgcgctgatgaaaccagcagccgacaaactggcagtagaattagcgaaaatcacctttaacgcaccaacagttcctgttgtgaataacgttgatgtgaaatgcgaaaccaatggtgatgccatccgtgacgcactggtacgtcagttgtataacccggttcagtggacgaagtctgttgagtacatggcagcgcaaggcgtagaacatctctatgaagtcggcccgggcaaagtgcttactggcctgacgaaacgcattgtcgacaccctgaccgccagcgcgctgaacgaacctagtgcgatggcagcggcgctcgagctttaaaagaggaaaatcatgaattttgaaggaaaaatcgcactggtaaccggtgcaagccgcggaattggccgcgcaattgctgaaacgctcgcagcccgtggcgcgaaagttattggcactgcgaccagtgaaaatggcgctcaggcgatcagtgattatttaggtgccaacggcaaaggtctgatgttgaatgtgaccgacccggcatctatcgaatctgttctggaaaaaattcgcgcagaatttggtgaagtggatatcctggtcaataatgccggtatcactcgtgataacctgttaatgcgaatgaaagatgaagagtggaacgatattatcgaaaccaaccttagttctgttttccgtctgagtaaagcggtaatgcgcgctatgatgaaaaagcgtcatggtcgtattatcactatcggttctgtggttggtaccatgggaaatggcggtcaggccaactacgctgcggcgaaagcgggcttgatcggcttcagtaaaagtctggcgcgcgaagttgcgagtcgcggtattactgtaaacgttgttgctccgggctttattgaaacggacatgacacgtgcgctgagcgatgaccagcgtgcgggtatcctggcgcaggttcctgcgggtcgcctcggcggcgcacaggaaatcgccaacgcggttgcattcctggcatccgacgaagcagcttacatcacgggtgaaactttgcatgtgaacggcgggatgtacatggtctgaccgcgatttgcacaaaatgctcatgttgcgcgcagtctgcgtggttatgagtaataattagtgcaaaatgatttgcgttattggggggtaaggcctcaaaataacgtaaaatcgtggtaagacctgccgggatttagttgcaaatttttcaacattttatacactacgaaaaccatcgcgaaagcgagttttgataggaaatttaagagtatgagcactatcgaagaacgcgttaagaaaattatcggcgaacagctgggcgttaagcaggaagaagttaccaacaatgcttctttcgttgaagacctgggcgcggattctcttgacaccgttgagctggtaatggctctggaagaagagtttgatactgagattccggacgaagaagctgagaaaatcaccaccgttcaggctgccattgattacatcaacggccaccaggcgtaagtgaacatctccaggcggtcgttcgaccgcctgagttttatctttttgtcccactagaatcattttttccctccctggaggacaaacgtgtctaagcgtcgtgtagttgtgaccggactgggcatgttgtctcctgtcggcaataccgtagagtctacctggaaagctctgcttgccggtcagagtggcatcagcctaatcgaccatttcgatactagcgcctatgcaacgaaatttgctggcttagtaaaggattttaactgtgaggacattatcagccgcaaagaacagcgcaagatggatgccttcattcaatatggaattgtcgctggcgttcaggccatgcaggattctggccttgaaataacggaagagaacgcaacccgcattggtgccgcaattggctccgggattggcggcctcggactgatcgaagaaaaccacacatctctgatgaacggtggtccacgtaagatcagtccattcttcgttccgagtacgattgtgaacatggtggcaggtcatctgactatcatgtatggcctgcgtggcccgagcatctctatcgcgactgcctgtacttccggcgtgcacaacattggccatgctgcgcgtattatcgcgtatggcgatgctgacgtgatggttgcaggtggcgcagagaaagccagtacgccgctgggcgttggtggttttggcgcggcacgtgcattatctacccgcaatgataacccgcaagcggcgagccgcccgtgggataaagagcgtgatggtttcgtactgggcgatggtgccggtatgctggtacttgaagagtacgaacacgcgaaaaaacgcggtgcgaaaatttacgctgaactcgtcggctttggtatgagcagcgatgcttatcatatgacgagtccgccagaaaatggcgcaggcgcagctctggcgatggcaaatgctctgcgtgatgcaggcattgaagcgagtcagattggctacgttaacgcgcacggtacttctacgccggctggcgataaagctgaagcgcaggcggtgaaaaccatcttcggtgaagctgcaagccgtgtgttggtaagctccacgaaatctatgaccggtcacctgttaggtgcggcgggtgcagtagaatctatctactccatcctggcgctgcgcgatcaggctgttccgccaaccatcaacctggataacccggatgaaggttgcgatctggatttcgtaccgcacgaagcgcgtcaggttagcggaatggaatacactctgtgtaactccttcggcttcggtggcactaatggttctttgatctttaaaaagatctaagttgtcattttccacccttataaaaggtccgcttgcgggccttttttcttagcttttattccgacttgttccgtagtgaacatgctgccacactaacaattctctgataaggagccggtatgttcttaattaacggtcataagcaggaaagcctggcagtaagcgatcgggcaacgcagtttggtgatggttgttttaccaccgccagagttatcgacggtaaagtcagtttgttaagcgcgcatatccagcgactacaggatgcttgtcagcggttgatgatttcctgtgacttctggcctcagcttgaacaagagatgaaaacgctggcagcagaacagcaaaatggtgtgctgaaagtcgtgatcagtcgcggtagtggcgggcgagggtacagcacattgaacagcggaccggcaacgcggattctctccgttacggcttatcctgcacattacgaccgtttgcgtaacgaggggattacgttggcgctaagcccggtgcggctggggcgcaatcctcatcttgcaggtattaaacatctcaatcgtcttgagcaagtattgattcgctctcatcttgagcagacaaacgctgatgaggcgctggtccttgacagcgaagggtgggttacggaatgctgtgcggctaatttgttctggcggaagggcaacgtagtttatacgccgcgactggatcaggcaggtgttaacggcattatgcgacaattctgtatccgtttgctggcacaatcctcttatcagcttgtcgaagtgcaagcctctctggaagagagcttgcaggcagatgagatggttatttgtaatgcgttaatgccagtgatgcccgtatgtgcctgtggcgatgtctcctttagcagtgcaacgttatatgaatatttagccccactttgtgagcgcccgaattaatcatgaaaaaagtgttattgataatcttgttattgctggtggtactgggtatcgccgctggtgtgggcgtctggaaggttcgccatcttgccgacagcaaattgcttatcaaagaagagacgatatttaccctgaagccagggaccggacgtctggcgctcggtgaacagctttatgccgataagatcatcaatcgtccacgggtttttcaatggctgctgcgtatcgaaccggatctttctcactttaaagccgggacttaccgctttacaccgcagatgaccgtgcgcgagatgctgaaattgctggaaagcggtaaagaagcacagttccctctgcgactggtagaagggatgcgtctgagcgattacctcaagcaattgcgtgaggccccgtatatcaagcatacgctgagcgatgataagtacgccaccgtagcgcaggcacttgaactggaaaacccggagtggattgaaggttggttctggccagacacctggatgtataccgccaataccaccgatgtcgcgttactcaagcgagcgcacaagaaaatggtgaaagcggtcgatagcgcctgggaagggcgtgcggacggtctgccttataaagataaaaaccagttggtgacgatggcaagtattatcgaaaaagaaaccgccgttgccagtgaacgcgataaggttgccagtgtatttatcaaccgtttacgcattggtatgcgcctgcagaccgacccgaccgtgatttacgggatgggagagcgttataatggcaaactttctcgtgcagacctggaaacgccgacagcgtataacacctataccattaccggtctgccgccaggtgcgatagcgacgccgggggcggatagcctgaaggctgctgcgcatccggcaaaaacgccgtatctctattttgtggccgatggtaaaggtggtcacacgtttaataccaatcttgccagtcataacaagtctgtgcaggattatctgaaagtgcttaaggaaaaaaatgcgcagtaagtatatcgtcattgaggggctggaaggcgcaggcaaaactaccgcgcgtaatgtggtggttgagacgctcgagcaactgggtatccgcgacatggttttcactcgggaacctggcggtacgcaacttgccgaaaagttaagaagcctggtgctggatatcaaaagcgtaggcgatgaagtcattaccgataaagccgaagttctgatgttttatgccgcgcgcgttcaactggtagaaacggtcatcaaaccagctctggctaacggcacctgggtgattggcgatcgccacgatctctccactcaggcgtatcagggcggcggacgtggtattgaccaacatatgctggcaacactgcgtgatgctgttctcggggattttcgccccgacttaacgctctatctcgatgttaccccggaagttggcttaaaacgcgcgcgtgcgcgcggcgagctggatcgtattgagcaagaatctttcgatttctttaatcgcacccgcgcccgctatctggaactggcagcacaagataaaagcattcataccattgatgccacccagccgctggaggccgtgatggatgcaatccgcactaccgtgacccactgggtgaaggagttggacgcatgagatggtatccatggttacgacctgatttcgaaaaactggtagccagctatcaggccggaagaggtcaccatgcgctactcattcaggcgttaccgggcatgggcgatgatgctttaatctacgccctgagccgttatttactctgccaacaaccgcagggccacaaaagttgcggtcactgtcgtggatgtcagttgatgcaggctggcacgcatcccgattactacaccctggctcccgaaaaaggaaaaaatacgctgggcgttgatgcggtacgtgaggtcaccgaaaagctgaatgagcacgcacgcttaggtggtgcgaaagtcgtttgggtaaccgatgctgccttactaaccgacgccgcggctaacgcattgctgaaaacgcttgaagagccaccagcagaaacttggtttttcctggctacccgcgagcctgaacgtttactggcaacattacgtagtcgttgtcggttacattaccttgcgccgccgccggaacagtacgccgtgacctggcttagtcgcgaagtgacaatgagtcaggatgcattacttgccgcattgcgcttaagcgccggtagccctggcgcggcactggcgttgtttcagggagataactggcaggctcgtgaaacattgtgtcaggcgttggcatatagcgtgccaagcggcgactggtatagcctgctagcggcccttaatcatgaacaagctccggcgcgtttacactggctggcaacgttgctgatggatgcgctaaaacgccatcatggtgctgcgcaggtgaccaatgttgatgtgccgggcctggtcgccgaactggcaaaccatctttctcccagccgcctgcaggctatactgggggatgtttgccacattcgtgaacagttaatgtctgttacaggcatcaaccgcgagcttctcatcaccgatcttttactgcgtattgagcattacctgcaaccgggcgttgtgctaccggttcctcatctttaagagagacatcatgtttttagtcgacagtcactgccatctcgatggtctggattatgaatctttgcataaggacgtggatgacgttctggcgaaagccgccgcacgcgatgtgaaattttgtctggcagtcgccacaacattaccgggttatttacatatgcgggatctggtaggcgaacgtgacaacgtcgtattttcttgtggcgtgcatccactcaaccagaatgatccctacgatgtagaagatttacgccgtctggcggcagaagagggtgttgtagcgctgggtgaaaccgggctggattattattacacgccggaaactaaagtacgtcagcaagagtccttcatccatcatatccagattggtcgtgaactgaacaagccggttatcgtccatacccgtgacgcccgtgccgatacgctggcaattctgcgcgaagaaaaagtgacggattgcggtggcgtactacactgttttacagaggacagagaaacggcgggtaaattactggatctcggattttacatctccttttccggcattgtgaccttccgtaatgcggagcaactgcgcgatgctgcgcgttatgtccccctggatcggttactggtggaaactgacagtccttaccttgcgccggtaccgcatcgaggaaaagagaatcaacctgcgatggttcgtgacgttgcagaatacatggctgtgttgaaaggtgttgccgttgaagaactggcgcaggtaaccaccgataacttcgcccgtctgtttcacatcgacgcttcccgccttcaatccatccgttgaatgagtttttttaaagctcgtaattaatggctaaaacgagtaaagttcaccgccgaaaattgggcggtgaataaccacgtttgaaatattgtgacatatgttttgtcaaaatgtgcaacttctccaatgatctgaagttgaaacgtgatagccgtcaaacaaattggcactgaattattttactctgtgtaataaataaagggcgcttagatgccctgtacacggcgaggctctccccccttgccacgcgtgagaacgtaaaaaaagcacccatactcaggagcactctcaattatgtttaagaatgcatttgctaacctgcaaaaggtcggtaaaagcctgatgctgccggtatccgtactgcctatcgcaggtattctgctgggcgtcggttccgcgaatttcagctggctgcccgccgttgtaagccatgttatggcagaagcaggcggttccgtctttgcaaacatgccactgatttttgcgatcggtgtcgccctcggctttaccaataacgatggcgtatccgcgctggccgcagttgttgcctatggcatcatggttaaaaccatggccgtggttgcgccactggtactgcatttacctgctgaagaaatcgcctctaaacacctggcggatactggcgtactcggagggattatctccggtgcgatcgcagcgtacatgtttaaccgtttctaccgtattaagctgcctgagtatcttggcttctttgccggtaaacgctttgtgccgatcatttctggcctggctgccatctttactggcgttgtgctgtccttcatttggccgccgattggttctgcaatccagaccttctctcagtgggctgcttaccagaacccggtagttgcgtttggcatttacggtttcatcgaacgttgcctggtaccgtttggtctgcaccacatctggaacgtacctttccagatgcagattggtgaatacaccaacgcagcaggtcaggttttccacggcgacattccgcgttatatggcgggtgacccgactgcgggtaaactgtctggtggcttcctgttcaaaatgtacggtctgccagctgccgcaattgctatctggcactctgctaaaccagaaaaccgcgcgaaagtgggcggtattatgatctccgcggcgctgaccagcttcctgaccggtatcaccgagccgatcgagttctccttcatgttcgttgcgccgatcctgtacatcatccacgcgattctggcaggcctggcattcccaatctgtattcttctggggatgcgtgacggtacgagcttcagccacggtctgatcgacttcatcgttctgtctggtaacagcagcaaactgtggctgttcccgatcgtcggtatcggttatgcgattgtttactacaccatcttccgcgtgctgattaaagcactggatctgaaaacgccgggtcgtgaagacgcgactgaagatgcaaaagcgacaggtaccagcgaaatggcaccggctctggttgctgcatttggtggtaaagaaaacattactaacctcgacgcatgtattacccgtctgcgcgtcagcgttgctgatgtgtctaaagtggatcaggccggcctgaagaaactgggcgcagcgggcgtagtggttgctggttctggtgttcaggcgattttcggtactaaatccgataacctgaaaaccgagatggatgagtacatccgtaaccactaatccgtaagacgttggggagactaaggcagccagatggctgccttttttacaggtgttattcagaattgatacgtgccggtaatgctgaaattacgcggtgtgccgtagacgatagaaccttccacgttggtatcgtaggttttgtcgaacaggttattgacgttcccctgtaagctgaagtttttcgtcacctggtagcgggtgaagagatccaccagcgcgtagctaccttgctcggcgcggaaggtgccatacggcgtcacggtgtcggtatacacgcgattttgccagttaacaccaccgccgaccgtcaactctggcatgacaggcaaccgatagctggtgaacattttaaccgtggtgcgtggcagattaggattaacggcgtttccttcgttatcctctgcaatatagcgcgttgcgccaaatgtcagctgccagttgtcggtaattgcgccgttgagttcaaattccacccctttactgactgtcccatccaccgctttataggcggtttcgccgttgctgccggggataggtgtaccggtggactgagcgacattatcctgctcaatacggaagatggctaacgtggtggtcagacggctattcatccagtcgcttttcagacccagctcgtagttgttaccggtgattggagccagatatttgccactactgtcacgatcattttgcggctggaaaatagaggtatagctggcgtaggtgctccagttgtcattgatgtcaaacaccagaccagcgtaaggcgtggtgtggtttttctccatgctgtaagtcagcgtatcaacccgccagttggtataacgtgcgccgaggatcagatgcagcggatcggcaagggtgacacgagtggcagcatataagcttttcatatgtgtggtatcgtcctgcgccaggctctgtggactccagtcggtttgtgggaaattgccattaaagttgtagaaactgccaatttcatccgggaagatgttggcccaactactgaagtaacgattgttttgtttgctgtaactgccaccaaacattagattgtgctgacgaccaaacaattcataactaccgtcagcgaacaaatccagcgcatcaactttacgtttgccactgttccaaccggtgccgccgacataatcaaagccaggtccataattactgtatggcccaaccagcataccatccgctttgtttacataggcatcgacatacatcattttgctgtcaaattcgacttcagagtgggtggcattcagtgtcgcttgccaggtatcagcaaactgctgcttcagggtcataaagaccttgttgatctctttatcgttgtacgcccagtcaggtgcggtactgcgtgcgcgatcgtaactgttgctgctgccatcagtattccagcgcggtaaaccgccccaggtagggctattaacatcaatgcgctgatattcgtaaccggcactaagcgtcgtaagatcgcctaaatcagcatcgacaatgccgctgaagaaggtcttttcactgttgtagcggtccagccaactgtcgttattctggtagccgccgacaattcgcgcgcggattttaccgtcttcggtgagtgggctttgtaaatccgccacataccgttctttgttccagctaccgtattccgcgctgacatcgcctttaaattcacgactggtcgcgtgttttcgaaccatattaattgccgcagatggattacccgtcccggtcatgagtcctgtcgcgccacgcactacttctacgcgttcaaagagtgccatatcagaaagtgcgtcgcccagattccagcggctttcaaaataggtggggataccatcaaccatatagttatcgatctggaatccgcgggaataataaagagcacgatcggaatccgcctgacttttgctgatccccagcgtgttttccatcacttcgcccagcgtttgtaactgctgatcttccatccgctgctggctaacaatagtgacgctctgaggaatatcacgttgagtcatctgcattttggtacccgcagaggtagacgttacgctgtaatcattttcgccatcatctggagctgtggcactaccctcaacaatcaccgtttcttcagtggctggtgcagcaaaagcggcagaaggtaatagtgccagtgctatgcaaccggcaagtagactcggtttggtgatggcttgatattgattatccctgttaaattgtgtactaagcatttgaaatctcttggtttatgttgtcgtcaggctcatgccggaggagggtgatgagcgattatatttagtgtgcgaataattttgtttgtaaatgcaaatgagaaatatacgcattcatatttgtcatgtaaaccaaacagagaatgtcttttcagcgcattcgcaggcagaaatgggaataatggcgatatatacggcagcaaaacgattttttgcttaagaaatcgtgagttaaggttgaaagagcaggtttaactcgaccatactctatactcgcagtgtggcgcggcgtagcatggcgcaacgcatggctatttgaaaaaggaaaatgtcgtggcagaagaaactatattcagcaaaattattcgtcgtgagatcccctccgatatcgtctaccaggatgatctggtaacggcgtttcgcgatattagcccgcaagcgccaacgcatattctgatcattccgaatatcctcattccgactgtgaacgacgtcagtgctgagcatgagcaggcgctgggacgcatgatcaccgtagcggcaaaaattgctgagcaagaaggtattgccgaagatggctatcgtctgatcatgaataccaaccgccatggcggacaagaggtttaccacatccatatgcacttgttgggtggccgtccgctgggaccaatgctggcgcataaaggtctgtaacgatgagaaaaggatgctttgggctggtgtctctggtgttgttactgctggtgggctgtcgtagtcatccggaaattccggtgaatgatgagcaaagcctggtgatggagagttctttattggctgcgggcatcagtgcagaaaagcccttccttagcacgtctgatattcaacctagtgcatccagtacgctttataacgaaaggcaagaacccgttaccgttcattatcgtttttactggtatgacgccagagggctggagatgcatcctctggaaaggccacgcagcgttaccattcccgcacatagcgcggtaacgctgtacggcagcgccaattttctgggggcgcacaaagtcagactttatctatatttgtaaggggtgaatcttgatgacaaaaatgagtcgctacgccttgattaccgcgctggcgatgtttctcgccgggtgtgtggggcaacgtgaacctgcaccggtagaagaagtgaaaccagcgccggaacaaccagccgagccacaacagcctgtccccacagtgcccagcgtgccgacgatcccgcagcagccaggcccaattgagcacgaagatcaaactgcaccgcctgcgccgcatattcgccattatgactggaatggcacaatgcagccgatggtcagtaagatgcttggggctgacggggtgactgcgggtagcgtcctgctggttgatagcgttaacaaccgtactaacggtagcctgaatgccgcagaagcgaccgaaacgctgcgaaatgcgctggctaataacgggaaatttaccctggtttccgcccagcaactgagcatggcgaagcaacagttaggtttgagcccgcaggacagtttaggcacccgtagtaaagccataggcattgcccgcaatgtcggcgctcattacgtgctgtactccagcgcctctggcaacgttaacgctccgaccctacaaatgcagctgatgctggtgcagacgggcgaaattatctggagtggtaaaggtgccgttagccagcaataagtaaaattatctggtcaggtaaaggtgccgtttcgcagcaataatcccatcacgcgcgacgaattgctgagccgctttttcccgcagtatcatcccgtcacgacgtttaatagtgggcttagtggcgggagttttctcattgaacatcagggccagcgttttgttgtgcgtcagccgcacgatcctgatgcgccgcagtccgcgttcttgcgccagtatcgggctttaagtcaactacccgcatgcattgcaccgaagccgcatttatatctccgtgactggatggtagtcgactatctgcccggcgcggtaaaaacgtatttgccggataccaacgaactggcaggcttgctgtattatctacatcaacaaccacgttttggctggcgaataacgctgttgccgttactggaactgtactggcagcaaagcgatccggcgcggcggacagtgggttggctgcgaatgttaaaacgtctgcgcaaagcgcgggaaccacggcctttacgcttaagtccattgcatatggatgtccacgccggaaatttagtgcatagcgcgagtgggttaaaactcatcgactgggagtatgccggagatggtgatatcgcgctggaactggcggcggtgtgggtggaaaatactgaacagcaccggcaattggtcaatgactatgccactcgcgcgaagatttatccggcgcaattatggcgtcaggtcaggcgatggtttccctggctgctgatgctcaaagcagggtggtttgagtaccgctggcgacaaaccggcgatcaacaatttatcaggctggccgatgacacctggcggcagctattaataaaacaataaggagagcagtgtgggtccagtaatgttggatgtcgaaggttacgaactggacgcggaagagcgtgaaatactggcgcatccgctggtgggagggctgattctctttacgcgtaactatcatgatcctgcccagttacgtgaactggtgcgccagatccgcgcagctagccgcaatcgtctggtggtggcggttgatcaggaaggtggacgcgtgcagcgttttcgtgaaggttttacccgcttgccagcggcgcaaagtttcgctgcgctgagtggaatggaagagggtggcaaactggcgcaggaggcaggttggttgatggccagcgaaatgatcgctatggatattgatatcagctttgcgcctgtgctggatgtcgggcatatcagcgcggcgattggcgagcgttcttatcatgccgatccacaaaaagccctggcaattgccagccggtttattgatggtatgcatgaagccggaatgaaaacgaccgggaaacacttcccaggacacggtgcagtaacggcagacagtcacaaagaaacaccgtgcgatccacgtccacaagcggagattcgcgctaaagatatgagcgtcttcagttccttaatccgcgaaaataaactcgacgccattatgcctgcgcatgtgatctacagtgatgttgatccgcgtccggcgagcggttctccctactggctgaaaaccgttttgcgtcaggaactgggttttgacggcgtgattttctctgacgatttaagcatggaaggtgccgcgattatgggcagttatgccgaacgcgggcaggctagtctggatgcgggttgcgatatgatcctggtctgcaataatcgtaaaggggccgtcagcgtgttagataatctgagtccgatcaaggcagaacgtgttacacgtttgtatcataaaggtagttttagccgacaggaactgatggacagcgctcgctggaaagcgatcagcacccgtctgaatcagttacatgaacgctggcaggaagagaaagcaggtcactaaccctggcttatgtgaggaagcgatgattatctatttacacggttttgactctaacagtccgggtaaccacgagaaagtcttacaattgcagtttattgacccggatgtacgcttgataagctacagtacgcggcatccgaaacatgatatgcagcatctgcttaaagaagtggacaaaatgttgcaactgaacgttgacgagcgtccgctaatttgcggcgttggcttgggcggatactgggcggaacggattggttttctttgcgacatccgccaggtgatcttcaaccctaatttgttcccttatgagaacatggaaggcaagattgatcgcccggaagagtatgccgatattgccactaagtgtgtgaccaacttccgtgagaagaatcgcgatcgttgcctggtgattttgagccgtaatgatgaagcgcttaacagccagcggacatctgaagagttgcatcattattacgagattgtctgggacgaagagcagacgcacaaattcaagaatatctccccgcatttacagcgcattaaagcgttcaaaaccctcgggtaaatgccctcgtcgcatcaggtaaccttgccggtacctgatgcgctccgaattctgtgggtcggataaggcgtccacgccgcatccgacagtcgagcatcaatgcctgatgcgcttcttatcaggcctaccgaacgccctgcatacacccctcactctatatcactctcacaaattcgctcaaataataaacaataaactctgttttttgatctcacccggtaaagtcgcctatcttttcagcaacaaaacttgattaacatcaattttggtatgaccaatgcaccattcatgttattctcaatagcgaagaacattttcattgctgtaacctgttgttaattaagagctatgttaataaccattaattaacaattggttaataaatttaagggggtcacgttgactacgccattgaaaaagattgtgattgtcggcggcggtgctggtgggctggaaatggcaacacagctggggcataagctgggacgcaagaaaaaagccaaaattacgctggtcgatcgtaaccacagccacctgtggaaaccgctgctgcacgaagtggcgactggcagccttgatgaaggcgtcgatgcgttgagctatctggcccatgcgcgcaatcatggtttccagttccagctgggttccgtcattgatattgatcgtgaagcgaaaacaatcactattgcagaactgcgcgacgagaaaggtgaactgctggttccggaacgtaaaatcgcctatgacaccctggtaatggcgctgggtagcacctctaacgatttcaatacgccaggtgtcaaagagaactgcattttcctcgataacccgcaccaggcgcgtcgcttccaccaggagatgctgaatttgttcctgaaatactccgccaacctgggcgcgaatggcaaagtgaacattgcgattgtcggcggcggcgcgacgggtgtagaactctccgctgaattgcacaacgcggtcaagcaactgcacagctacggttacaaaggcctgaccaacgaagccctgaacgtaacgctggtagaagcgggagaacgtattttgcctgcgttaccgccacgtatctctgctgcggcccacaacgagctaacgaaacttggcgttcgcgtgctgacgcaaaccatggtcaccagtgctgatgaaggcggcctgcacactaaagatggcgaatatattgaggctgatctgatggtatgggcagccgggatcaaagcgccagacttcctgaaagatatcggtggtcttgaaactaaccgtatcaaccagctggtggtggaaccgacgctgcaaaccacccgcgatccagacatttacgctattggcgactgcgcgagttgcccgcgtccggaagggggctttgttccgccgcgtgctcaggctgcacaccagatggcgacttgcgcaatgaacaacattctggcgcagatgaacggtaagccgctgaaaaattatcagtataaagatcatggtagcctggtaagcctgagcaacttctccaccgtcggtagcctgatgggtaacctgacgcgcggcagtatgatgattgaaggacgaattgcgcgctttgtatatatcagcctataccgaatgcatcagattgcgctgcatggttactttaaaaccggattaatgatgctggtggggagtattaaccgcgttatccgtccgcgtttgaagttgcattaatcgacgtacactggcggatgtggcataaacgcctcatccgcccttgaggaacagcgcgatcggcagccgcgttgtatcaggcatcctttcagactcctccgaatccttaagtatttccagccattcccgcgcttttcatcttctgtctgatagctgcttttctccttcgcttgcatgattggcataactgcaaagaaggaggtgttcccgtgaataaaagtatgttggcgggtatcgggattggtgtcgcagctgcgctgggcgtagcggcagtggccagtctgaacgtgtttgaacggggcccgcaatacgctcaggttgtttctgcaaccccaatcaaggaaacggttaaaacaccgcgtcaggagtgtcgcaacgtcacagtgacccatcgtcgaccggtgcaggatgaaaatcgcattaccgggagcgtgctcggcgctgttgctggcggcgtgatagggcatcagtttggtggtggtcgcggtaaagatgtcgccactgttgtgggggcgctgggtggtggatatgccggtaaccagatccagggctctctccaggaaagcgatacttacacgactacgcaacagcgttgtaaaacggtgtatgacaagagtgaaaaaatgctcggttatgatgtgacctataagattggcgatcagcagggcaaaatccgcatggaccgcgatccgggtacgcagatcccgctagatagcaacgggcaactgattttgaataacaaagtataacaaggctgtactctgcaatttggcccctcattcgctcaggctgaggggctttttttgcgacttatttcaccagttcgggccataaacgcaaagtcgttccggcaatctgcatcagtttttccaggcttgcaccttcgcgtgcgctgatgctcatcccctgaataatacaattaaggaattctgccagatgtgtcacgtcacagtggggcgggatttccccgcgcgcttgtcgttgacataaaaactgctgcaaagtgcgctcttgcatcgcatggcgacttttcaacgtattggcgatatctccactatctggggagagggtggtgcagttgttgatcatgaagcagcctgccggggtgtctttgctggtaaagcagttggcgatggcagcaaaatagtcagccagcgcagactccacgcttttctcttcacaaaacagctgtgcttcatgcttagcggcaaaacgatcgatatagcggtcgagaacggcacgaaataacccctctttgttggtaaattccgcgtatagcgtgggcgctttggctccggtcgcttcgacgaggtccgcaagagaagtcgcttcataaccgtgttgccagaacaatttcatggccttatcaagcgcggcatccctgtcgaacacttttgggcggccacggcttttttttacacattgtgtactgtcagttgccatgatgccgttgtacctggtgactgtgaatgaaaggttattataaaaataatcacctccgttcaccagtccagatcccataaaaataattgctttctatttaactgaaatttaaagatttttaaattaattaatgattgttataaaaaatatcttgtatgtgatccagatcacatctatcatttagttatcgatcgttaagtaattgcttgcgacgtcattcatctgcataaggccactattatgaaaaacgtaaaaaccctcatcgctgcggcgattttaagctccatgagttttgccagctttgcggctgtcgaagttcagagtacgccagaaggccaacaaaaagtcggtacaatcagtgctaacgcggggacaaatctgggaagcctggaagagcagctggcgcaaaaagcggatgagatgggcgcaaaatctttccgtattacttctgtaaccggtccgaataccctccatggaacagcagtaatttataaataagcattaaccctcattaatgcctgctactgctgattttttccccgcgacatgccgtgtcgcggggatttttttatccgggctttacagcgtttgtgggctcacttgatgacggcggacatccaccggcatcccggaacggacatccatcacatgttgcatcacttcagcgtcagtttgtgctgcatctttaaaactttgcattgcgctattcagcgtaattggcagcagctgcggatcgtcatcaatcttctcactcagcggctgatgtacttcaaccagacgcgcaccgtttggttcggcagagacttttatcggagtgttgatgatattcactttggtgcctggggtgacctggctaaagagtgttttgatatcgtcatcccgcagacgaatacagccagaacttacccgcatgccaatgccgaaatcggcgttcgtaccatgaagcaaataaacgccgccataggccgccagacgaatcgcatgatggcccattgggttatccagtccagccggcactaccgcaggcaactcaattccctgtgctttataacgggcgcggatgtttgccgttggcgtccaggttgggtttgcacgtttgtcactaacggtggtcaccattgtcggtgtcagcgtgtcaccacctaactgaccaatacctattggatacacggttacgctatttttacccggcgggtagtaatagagacgcagctccgcaatgttgatcacaatgccttcgcgcggcgcatctggaagtagggtttgcaacgggatcgttaacacgctgcccgcgcgcggtacgtaaggatcaacgccggggttagcctgtaacagagcgagaaagccgacgttgtattttttggcgatggcttccagagaaccaccgtcattttccaccacatgaaatttgttttcgccaaccagacgactgcccgctggcggcagcggccaggtgttggcttttgccggtagcgccagcgccacggcagcggcgaacgtaaaaaacgttagccagcgagaaaaacgcgttttgatcatcaccaaaaatccataataaatataaggttattgtaataaacagataagcctgaattatggatggtgacagtgtcggatagtgcagggaagtgcaaagaatttgtaaatgttgcagatgggggcgcagaaacgcccccgatttaccattaagcgatcgcgttctcttccagttcacgcataaactggcgtacccattcgatacgcgttttccgctcactcaaatcctgaataaatttcaggcgcgtcggaccatcaaggcggtaatgctgcggctgtttttgcagcaaaccaatcaaccaggccggattaacgtgattcttctcggcaaattcgatcaccccgcctttctcattaccttccagcttcctgatccccagtttctgcgcttgctggcgcagacgggcaatatccagcagggtacgcgccggatctggcagcaggccgaagcgatcgataagctcgactttgatctcttccagttcgttttccgttttggcgctggcaatacgtttgtagaagctcagacgcgtgttcacgtcagggatgaaatcatctggcaataggctcggcatccgcagctcgacttctgtttgctggctggtgagatcttccaggctcggctcgcgtccggctttcagtgcatcgacggcgttttccagcaactccatatacaggctgaaaccgatggtttccatactgccgctttgttcttcgccaagcagttcacccgcgccgcgaatctccagatcgtgcgttgccagcgcaaaacctgccccgagatcttccaggctggcaattgcttcaagacgtttttgtgcatcggtagtcatcgcttttggatgcggtgtcagcaaccatgcatatgcctgatgatggctacgtccgacgcgaccgcgtaactggtgcagctgcgccagaccgaagtgatccgcgcgttcaatgataatagtgttggctgtcgggatgtcgatcccggtttcgataatggttgtacaaaccagcacgttgaaacgttgatgatggaaatcattcatcacccgttccagttcgcgctcgcgcatctgcccgtgaccgatggcgatccgcgcttctggcaccagttctgccagccgttcggcggctttctgaatgttttccacatcattgtagagataataaacctgtcctccgcgcaaaatttcacgcaggatcgcctcccggaccaccatgctgtcatactcacggacaaaggttttaactgccagacgacgggcgggcggcgtggcgataatgctcaggtcacgcattccgctcattgccatattcagcgtacgtgggatcggcgttgcagtaagcgtcagaatatccacgttcgcgcgcatcgctttaatgcgctctttatgacgcaccccgaagcggtgttcttcatcgacaatcagcaggcctaaatctttaaacttgacgtcactttgcagcagtttgtgcgtaccgatcagaatatcgattttcccttccgccacttccgcaaggatttgcgtctgctctttggcgctgcggaaacgggagatcatttcgatacgtaccggccagttggcgaaacggtcgcggaagttgtcgtaatgctgctgcgcgagaagggtggtaggcaccagcaccgccacctgcttgtggttatctactgccaggaaagctgcgcgcatcgccacttctgttttaccaaagccaacatcgccgcacaccagacgatccattgccagcggctgacacatgtcgctaagtaccgcattaatggcctgcgcctgatccggcgtggtttcaaacgggaagctgtcgcagaacaactgatactgctcacgatcgtgtttaaacgcgaagccctctttggcggcgcgttgcgcgtagatatccagcaattccgccgccacatcacgcactttttccgccgctttctgccgcgcgcgactccacgcatcgccgccaagtttatgcagcggggcgttttcttccgcgccacctgcgtaacggctaatcagatgcagactgctcaccggaacatacagtttggcgtcgttggcataggtgagcatcagatactcgccagtaatgccacccgcttccagcgtggtcattccggcataacgaccgacgccgtgctccagatggaccaccggctgaccaatatgcagttccgcaaggttacggatcagtgtatcggggttgatggtgcggcgagaatcctgacgacgacgggcaacgcgttcaccgagcagatcgctttcgcaaatcagcgccagattacgcaccgtatcgacaaaaccatgttcggcagcgccaatcatcagataacgcccacggtcgctggcttcatcaagacgcataatgcgttgcggagcaattttaattcgtgcgagcagttcacccagcgcttcacggcgaccttcactttctacgctgaacaccaccggaccgtcgaaagtctcgaggaacttacgcagcgcatccagcggcgctttttgttgtgcctgaacggccaggtctggcagtttctggaaacctaaattggcattcgcggcttttgtcggtaaatgttcagtttttagctgcacccggggccagtttttcagctcactgaagagctcgtccacccgcagccagaggctttgtggtggcaacagcgggcgcatcggatcgacgccgcgattctcaaaacgcgccagcgtgtcagcctggaaacgttcggcactggtttccagatcgccagtattcacgagcaaggtattggcagggaaataactgaacagcggcggcagtggttcgctgaagaacaatggctgccagtactcgatcccggcaggtaatgtgcctttactcacttgctggtaaatatgttctggatcgcgcttcacttcgaaggtatcgcgccactggctgcggaacagttcaattgccgctttatcggtcggaaattcgtgcgcgggcagcagattgatcgcttctacttcctccagcgtgcgctggctgtcgacgtcaaacacccgcaggctgtcgatttcatcatcaaagaaatcaagacgataaggcagctcactccccatcgggaagagatccagcaacgcgccgcgcgtggcgtattcgccgtgctccatcacctggtcaacatggcgataaccggcgctgtccagttgggttcgtaatgcatctcgactcaggcgctgaccttttttcatcaccagcgcatgaccgtggagaaaactgtgtgggcaaacgcgctgcataagcgtattcaccggaacaatcagtacgccacgctgcatcgtcggtagctggtaaagggtggaaaggcggctggagataatgtcctgatgagggctaaaactgtcgtagggaagagtttcccagtccgccagattcatcaccatttgatcggtaaactggctgatttcatcatgcaaacgcagagcattttgcatatctggtgcaatgagtaccaccggaccggcgtgacgttcggcaatttccgctaccagcgttgcacaggctgcgccggttaactcgcccagcagacgctgctcacccgctttgacgggcagcgtataacgatattgttcaggcataacggttgtcagattctcgttaggatatgcctcaacatatgggggcatatctctgataagcaatgctgttcattatccgtaatcgacatggtttagcaaattgaatcgccccggctggggcgatggcttagcgggagtaactgacggcagcgggcagactaggcggggagaacaacagatcgctgaatgcacgctgactaagttttcttaccagcaagcccgcaacagtacagatgaacaaactgacaaagggataaaccagcaggagtgtcagttcgacttgcgggctccagcgtgctgcgttcatttgcgcaagcagagttaagctgaatatttcaaccagaatgcgatgggtggtgtagatagcaatggtgttggagccaatcacattcagcaggctggtggagcgcataccgaatcgttgctcgtattgataaaacagcttcatgatcaccacaatgcttaccaggctcaacagcaggctgatagtaaacaaccaggcaccgaccgccagaacggtaagcaaagaagccatcagcagatggcggcgcaacggcacctctttaacacaggtcattattgttgcgccaaaccatgcgccaaggctgtaataaggcaaattgcggatcacactgttcattccccaccacggcgtgggaacgaaattaaccgccacactcagcagtacaaacaaggcgaatagtggcagcgccagacggctaaaaattttacataccacgaaatagacaattaacgcatacagataccacaagctggtgctggcggtgatcatcccgtgcaggaactcaccggtggaatcggcataagcggcattggaggcattgcttaaatcgcgctcaggtgccagccactggttcagcgcacttaacgccagccactgcaccacgccccaaagcgccagcacccagaagatgttccagatccgtttatcgagacaatttccccacggtacgctgtcgatatagcggcgaatcaaatagccggatataaagaaaaaaaccggcatacgaaagggggcaaggtaaagattgaaatagatccagcatttgctcaggacttcgcttaacggatgctgaaaagtggtcagatgcggataaaaggtaatgacgctgtgataaatcaccaccagacaaatacataaccctttgatctggttaatccatagctctttttgtttcatcaggacaacacgctcttttttaatttacatgcggttgatcctgcgggttatgacccgaggtgtaatgggtatctgtctgtattggatgatttttcagattaagatcaggcggcaagattgatgataaaacatggcaatttagccgattgatttacgggggcttttcagattagccctgacgatcacttacagttcagacgtttacccatcttgctttcgcttatatactcgtgtctttgctacagcaaccagacggatttcatgtaccaacctgtcgctctatttattggcctgcgttacatgcgtgggcgtgcagcggatcgcttcggtcgtttcgtctcctggctttctaccatcggcattaccctcggggtgatggcgctggtcacagtattgagtgtgatgaacggctttgagcgcgagctgcaaaacaacatccttggcctgatgccacaggcaattctctcttctgagcatggctctcttaacccgcagcaactcccagaaacggcagtcaaactggacggcgttaatcgcgtcgcacctattactaccggtgatgtggtactgcaaagcgcgcgcagcgtggcggtcggggtgatgctcggtatcgacccggcgcaaaaagatccacttacaccgtatctggtcaatgtgaaacaaactgacctcgagccggggaaatataatgtcatcctcggcgaacaacttgccagtcagctaggcgttaatcgcggtgatcaaatccgcgtgatggtaccatctgccagccagttcacgccgatggggcgtattccaagccagcgcctgttcaatgtgattggcactttcgccgccaacagtgaagtcgatggctatgaaatgctggtgaatattgaggatgccagccgtctgatgcgttatccggcaggcaatattaccggctggcgtttgtggctggatgagccgctgaaagtcgacagtttaagtcagcaaaaactgcctgaaggcagcaaatggcaggactggcgtgatcgtaaaggcgagttgttccaggccgtacgcatggaaaaaaatatgatgggtttactgctgagcctgattgtcgccgttgcggcgtttaacattattaccagtctagggctgatggtaatggagaagcagggcgaagtagcgatcctgcaaacgcaaggcttaactccgcgacaaatcatgatggtctttatggtgcaaggggccagcgccgggattatcggtgcgatcctcggagcggcgcttggcgccctgcttgccagccagttaaataatctgatgccgataatcggcgtcctgcttgatggcgcggcgctgccggtggctatcgaacctttacaggtcattgttattgcgctggtggcgatggctatcgcgctgctgtctacgctttaccctagttggcgcgctgccgccactcaacccgctgaggctttacgttatgaataagatcctgttgcaatgcgacaacctgtgcaaacgctatcaggaaggcagtgtgcaaaccgatgtgctgcacaatgtcagtttcagcgtcggcgaaggtgaaatgatggcgatcgtcggtagctctggttccggtaaaagtaccttgctgcacctgctgggcgggctggatacgccaacctccggcgatgtgatttttaatggtcagccaatgagcaaactgagcagcgcagcgaaagctgaactgcgcaaccagaagctgggctttatttatcagtttcaccacctgctgccggattttaccgccctggaaaacgtggctatgccgctgctgattggcaagaaaaagcccgctgaaatcaacagccgtgcacttgagatgttaaaagcggtggggctggatcatcgtgcgaatcaccgcccatctgaactttctggcggcgaacgccagcgtgtggcgattgcccgtgcgctggtgaataacccgcgcctggtactggcggatgaacctaccggtaacctcgatgcgcgtaacgccgacagcatcttccagttgcttggggaattgaatcgcttgcagggcaccgccttcctggtggttactcacgacctgcaactggcgaaacgtatgagccgccagttagaaatgcgtgatggtcgtctgacggcggaactgagcctgatgggggcggagtaatggcgatgcctttaagcttattaattggcctgcgttttagtcgcggacggcggcgcggcggcatggtgagcctgatctccgttatttctaccattggcattgccctcggcgtggcggtattgatcgtcggcttaagcgcgatgaacggctttgaacgcgaactgaacaaccgtattctggcggtggtgccgcatggtgaaatcgaggcggtggatcagccgtggactaactggcaggaagcactggatcacgtgcaaaaagtgccgggtattgccgctgccgcgccgtatatcaatttcaccgggctggtggaaagtggcgcgaatcttcgcgcaatccaggtgaagggcgttaacccgcaacaggaacagcgtctgagcgcattacccagctttgtccagggcgatgcgtggcgcaattttaaagcgggcgaacagcaaattatcatcggcaaaggcgtggcggatgcgctgaaagtgaagcagggggattgggtgagcattatgatccccaacagcaatcccgagcataaactgatgcagccaaaacgtgtgcgtttgcacgttgccggtattttgcagttgagtggtcaactcgatcacagttttgccatgatcccgctggcggatgcccaacaatatcttgatatgggttccagcgtgagtggtattgcccttaaaatgacggatgttttcaacgccaataagctggtacgcgatgcgggtgaagtgaccaacagctatgtttatattaaaagctggattggtacttacggctatatgtatcgcgatatccaaatgatccgcgccattatgtatctggcgatggtactggtgattggcgtggcctgtttcaacatcgtctccaccttagtgatggcggtgaaagacaagagtggcgatatcgcagtattaagaacgctgggggcgaaagatggtttaattcgcgccatctttgtctggtatggattgctggcagggctgttcggcagcctgtgtggtgtgattatcggcgtagtggttagtctgcaacttaccccgattattgagtggattgaaaagttgatcggtcatcagttcctctccagcgatatctattttattgatttcctgccaagcgaattgcactggctggacgtcttctacgtactggtcacagcattgttgctgagtcttttggcaagttggtatccggcgcggcgcgccagtaatattgaccctgcgcgagtccttagcggccagtaaaggcagtacattaaaacaaggagcggcaatgtattacgggtttgatattggtggaacaaaaattgcgcttggcgtgtttgatagcggtcggcagttgcagtgggaaaagcgggtgccgacaccgcgtgacagctatgacgcatttttagatgcagtgtgtgagctggtagctgaagctgaccaacgttttggctgtaaaggttctgtcggcatcggtattccgggaatgccggaaacagaagatggtacgctgtatgccgccaatgtccccgctgccagcggtaaaccgctgcgtgccgacctgagcgcacgtcttgatcgcgatgtacgccttgataacgatgccaactgttttgcccttagtgaagcctgggatgatgaatttactcaatatccactggtgatggggttgattctcggcaccggtgttggcggcgggctgattttcaacggcaaaccgattaccggtaaaagctacattaccggcgagtttggccatatgcgtctgccggttgatgcgttaaccatgatggggttggatttcccgttacgccgctgcggctgtggtcagcatggctgcattgaaaattatctgtctggtcgcggttttgcgtggctgtatcaacactattatcatcaaccgttgcaggctcccgaaattattgcgctttatgatcaaggcgatgagcaggcaagggcgcacgttgagcgttatctggatttattagcggtttgtctgggaaatatcctgaccatcgttgaccctgacctggtcgtcattggtggtggcttaagcaatttcccggcaatcacaacgcaactggcggacaggctgcctcgtcatctcttacctgtagctcgtgttccgcgcattgaacgcgcgcgccacggtgatgcgggaggaatgcgtggtgcggccttcctacatctaaccgattaaacaacagaggttgctatgctgagccgtcggggtcatcggttaagtcgttttcgtaaaaataaacgccgcctgcgcgagcgtttgcgtcagcgtatttttttcagagataaagtggtgccggaagcaatggaaaaaccaagagtactcgtactgacaggggcaggaatttctgcggaaagtggtattcgtacctttcgcgccgcagatggcctgtgggaagaacatcgggttgaagatgtggcaacgccggaaggtttcgatcgcgatcctgaactggtgcaagcgttttataacgcccgtcgtcgacagctgcagcagccagaaattcagcctaacgccgcgcatcttgcgctggctaaactgcaagacgccctcggcgatcgctttttgctggtgacgcagaatatcgacaacctgcatgaacgcgcaggtaataccaatgtgattcatatgcatggggaactgctgaaagtgcgttgtagtcaaagtggtcaggttctcgactggacaggagacgttaccccagaagataaatgccattgttgccagtttccggcacccttgcgcccgcacgtagtgtggtttggcgaaatgccactcggcatggatgaaatttatatggcgttgagcatggccgatattttcattgccattggcacatccgggcatgtttatccggcggctgggtttgttcacgaagcgaaactgcatggcgcgcacaccgtggaactgaatcttgaaccgagtcaggttggtaatgaatttgccgagaaatattacggcccggcaagccaggtggcgcctgagtttgttgaaaagttgctgaagggattaaaagcgggaagcattgcctgatgcactacgcttatcaggcctgcaaggggacgcaattaattgaatttgcgggttttgtgggccggataaggcgttcgcgccccatccggaataatacacgcgcacttttccggcctcttttatcgtttactcgtcaataacaatgcggcaataaacgtacagacaccaattagccctgcccagagtgggcttattctggtaatcgcaaagctattatcgatatacaaacataaagcctgataacccatattggcaatagtcatcgccactgcaaattttaacgcataaataaaacgagtcgtgtagtaaaagatcctggaaaataagataaacgtcgcagcccaggcgataaaacctaatgtgttggtgctgccggggggagcattttcatgctgttgtcctggatgcggataatacgttagtggcggcgtgctttgttttaatatctgtgcttgtagaacagccaatgcattattgattccctgataccagagatctgcatttaaataagccagcgtgtgattttctatcagaaggccgagatgtttatcgtccagaccactttcaacctggccgttggtgatcataattaaccgtggttcgcgggtagtaaatagtaacagaacacttccttttacatcactcaaactagaactcgcatgcgccagcatcgctttaccattttgtctgagactggcttcattattaatgtcgggtaaaaccacaataaacggtgcaattcccgtttgttggcgaaaaagctcggctttatgcgcgatctcttcagcatctggtacagtaccggtaacgtccgtaaaaagtgtcttcattattggaattaatggcttgctggctgctgtcagaggcaggagtatcagtaaactgagcagtataatgaattttttcatgggcgggacttccgtttcctgcgactttttttagaggagggcatacttattaataaaccgacggcgataaaaataacgcccataatgccgataaacccccatttaaaaaaattaacccacgggttatttatctcagccttttcaggatgcccgggagaataataaacattaactttatcgccttcgctgtcttcataaaaatcgctgccgatactgctattgaaaattagcgtgtaatctggcgtcggtcgaaaggcaacgacgggataccagctaccatctttacccgtgcgatgagaatgactggagtgccagacggtatcaacaatgacgccttcggtatgaatcgcgtctttgctataggtgaactggttataaaagacaacaacagaaatgaggatcagtaccagaccgataccgaggaatatacgaaagaaaactttactgtcctgactcattagccacatccttgctaactaaaaaacgggcggtaataccaccgcccgcttgctgaattaacgtcctgctttcagcttctgataatactcttcataaatgctgctggctgcgccaacgtcattctgccattcgccatttttaatggtttcagcatccgggtagagtgttttatcgttcgccacttctggacttaacagcttacgcgccgcaaggtttggcgttggataaccgatagtttcagcaacctgttttgccacatccgggcgcagcaggaagttgatcaatttcagcgcgccttctttgtttttggcatttgccgggatcgccaggctgtccatccagaaaatgccgccttctttcggccacaccacgtcaattggcgtacccgcctggcgtgcaacgaaagcagaaccgttccagatcatgccgaggttaacttcgccttccatgtacgggttcgccgggttatcggagttaaaggctgccacgtttggcatcagttttttcagctcgttatatgcagcttcaatctctttcggatcggtggtgttaccggagtagcccagcttacgcagcgccatctggaacacttcacgggcatcgtcggtcaacagcaggctgcctttgtactctggcttccacagatcggcccagctggtgacagatttcggatccaccgcatcaccgttaacaccaatcgccgtcgcaccccagatatacggaatggagtagtcgttattcgggtcaaaaggcttgttgagcatgtctggatcgagattgctgaagtttgttaacttgctcttgtcgatcttctggatcatcccttctttacgcattttatcaacgtaataggtactaggaaccaccagatcataggcaccgtctttgtatgttttcagcttggcgtacatggtttcgttgctctcgtaagtgctatagataaccttaataccggtttctttggtgaactgttcaagcagtcctggcggcacgtactcggtccagttgtagaaatacagcgtgttgttgtcatcggcgtgagcggcgctcatgcccagtgccagagcacccgccgcgagcaggtggcgactccattttttcatttaacgtcccctgtgttacctttcgttttatcacgagcaataagctggctggcaataaccatcaccaggctcagcaccagtaatatggttgccagcgcgttaacttccgggcttacgccgactttgaccatgctataaatttttaacggcagaatttcataacttggtccggtgacgaagctagaaactaccacatcgtccatgctcagggtaaagcttaacacccagcccgccgccaccgctggcattgccagtggcagaatgatttttcgcagaatggtaaattcgctggcaccgagatctttcgccgcttccagcattcgcacgtcaaaacctttcaggcggctatacaccgtcaccaccacaaatggcaggcagaaggtgatatggctgaacagcaggctccagaagccaagctgaatacccagcagcataaacagcaccagcaggctaatcgccatcacgatatctggactcatcatcaccacaaacagcattccgctaacgaacggcttaccacgaaagcgataacggtacagcgcaactgccgtcagactaccgataagcgtagcaaacgtcgcgctaaacaccgccattgttagactatgctgcgctgcctgtaacaggctgtcgttgttcatcagcaggctataccatttggtggtaaagccctgccagttgatgccaaagcggctgctgttaaaggagttcacaatcaaaataatgattgggatatacaggtacgcgtagatagcggtcataaaaccgccgcgaagcagtcgaccgatcattcgagttccaccttcttattcagcaaacgagaagcgcgccagtaaaccagcaacatcaggcccattacgatagtcagcgtaatgctggtagctgcaccaaacggccagtcacgaatattaaggaactggaccttgatgacgttaccgatcagcaggtttttcgcaccgcccatcaggtcggatacatagaacaggcccatcgctggcagcatcaccagcagacatccggcaataattcccggcatcgtcagtggaataatgatacggataaaagtctgtaacttgctggcaccgagatcgcgcgccgcctcaagcaacggcttatccagtttttcgatactggagtacagcggcatcaccataaacggcagcagaatgtaaaccagaccgataatcaccgcactgggcgtgaacatgatacggattggtgtgtcgataacgcccagccagagcaaaaactcgttgagatagcctttggtgctgaggaaaattttcagcccgtagatacgaattaaactgttggtccagaacggaacaatcagcagaaacagcagcagcggacgcaccttgtgtggcaacttcgccagaaaccaggcaaacgggtagcccagcaccaggcaggcgagggtggcgatcagcgccatattcaggctgtgcaatagcacttcaaaatagagcggatcgagcagacgcgtgtagttatccagcgtaaagaccattttgacaaaactggcgtcgtcgcgggtcaaaaagctggtgccaatgatcatcaggttgggcagaaagacaaacaacacaagccaaccgacaatagtgacaatcactacattctggaacttacttgtgttcttcatcagccagtacgacctcccagctttctacccaattaatggccattttttggtcgagagagtggtcaaagtcaggatcgtcttcattgaagaattcgctgaccatcaccatcttgccattttccagttcaacaacgctctccagcgtcatgcctttgtagttacgctcgcgaacgtaaccaatcagcccttcagcgtggttgtcgtcgttaatctcttcaacacgtaagtcttccgggcgcagcagaacatgcagtttttgccccggttcaacggcgaagttaacgtagatattacattcgcggccttcaacgttggcgcgtacgcgctgctcgtctagacgttcgatgacagtggcgttaaacatattgatttcgccaatgaagccggcaacaaacaggtttttcggctcttcgtagatttcacgcggcgtgccgtcttgctcaatgcgaccatcgcgcatcaccacaatcctgtcactcatggtgagtgcttcttcctggtcgtgagtcacaaagacgaatgtaatgccaagcttacgctgtaacgctttcagctcgttctgcatttgcttacgcagtttgtaatccagcgcactgaggctctcatccagcaacaacagacgaggcttgttaaccaccgcgcgagcaatggcgacgcgttgctgttgaccaccagagagctgatgcggtttgcgttgagcgaaggtttccaactgcaccatccgcagggcttccatcacgcggggcgtaatttcagcagcgggggttttttgcatgcgcaacccaaaggccacattttcgaacacggtcatgtgggggaaaagtgcgtagctttggaaaacagtgttcacatagcggttttccgccggaacgtgggtgatgtcctcgttatccagcatgatgcgtccggaatcaacagtttccagacctgcaatcaggcgaagaacggttgttttaccgcagccagaagggccaagcagcgtgaggaactcgccattgttgatagtcagatccagctggggaatgacctctttaccatcaaagcatttgcgaattcccgccaattgcaccagcggactaaggctactcggttgtttattcaattttttactctgtcccatgtaaacgcaacggatggcttaccgatgcggggtttgtggttaaccaccttggtgactcttaatgagggcggtaattctacggcaaaccgcttgaatcgccaatctttgttgtgaattactggcttagctttatattcattaaggtaatgctgataaatattcccgcttgcaggggtaaaagtgacctgacgcaatatttgtcttttcttgcttcttaataatgttgtcacaaaaagtgagggtgactacatggataaactacttgagcgatttttgaactacgtgtctctggatacccaaagtaaagcaggggtgagacaggttcccagcacggaaggccaatggaagttattgcatctgctgaaagagcagctcgaagagatggggcttatcaatgtgaccttaagtgagaagggcactttgatggcgacgttaccggctaacgtccctggcgatatcccggcgattggctttatttctcatgtggataccagtccggattgcagcggcaaaaatgtgaatccgcaaattgttgaaaactatcgcggtggcgatattgcgctgggtatcggcgatgaagttttaagtccggttatgttcccggtgctgcatcagctactgggtcagacgctgattaccaccgatggtaaaaccttgttaggtgccgatgacaaagcaggtattgcagaaatcatgaccgcgctggcggtattgcaacagaaaaaaattccgcatggtgatattcgcgtcgcctttaccccggatgaagaagtgggcaaaggggcgaaacattttgatgttgacgccttcgatgcccgctgggcttacactgttgatggtggtggcgtaggcgaactggagtttgaaaacttcaacgccgcgagcgtcaatatcaaaattgtcggtaacaatgttcatccgggcacggcgaaaggagtgatggtaaatgcgctgagcctggcggcacgtattcatgcggaagttccggcggatgaaagcccggaaatgacagaaggctatgaaggtttctatcatctggcgagcatgaaaggcaccgttgaacgggccgatatgcactacatcatccgtgatttcgaccgtaaacagtttgaagcgcgtaaacgtaaaatgatggagatcgccaaaaaagtgggcaaagggttacatcctgattgctacattgaactggtgattgaagacagttactacaatatgcgcgagaaagtggttgagcatccgcatattctcgatatcgcccagcaggcgatgcgcgattgcgatattgaaccggaactgaaaccgatccgcggtggtaccgacggcgcgcagttgagctttatgggattaccgtgcccgaacctgttcactggcggttacaactatcatggtaagcatgagtttgtgactctggaaggtatggaaaaagcggtgcaggtgatcgtccgtattgccgagttaacggcgcaacggaagtaagcgaaaagggatgcggcatgtgatgccgcatccggcttaaatccaaacttacccttcgaagaaccaatacccgctattgaccagcgccgcgagcatcgcgaggaaactcggatcttccagcgcatcgccaaaattctccgcagtcagcgcaatgttgctggcgagtgcatccagtgccggacggtgcggggaatcgatcttctcaccattggcatacacgtcgtcgccaatgcgcaatacgcgcagaccacccaggcgcaccagcacttcaccttgtttcagcgcatcgtagatttcatccggctgataaggcggctctggcggcgcgatatccagttcatgacgactctgggatataaactcgccaaaccattgcttaaagtgttccggctggttgatcaattcgagcatcatctcacgcagtttatccatctcttgcggcagaacatccgcaggatgagcgcgaggtggaacatccggatcgctgtagtagttgccgcccagttcacgttgcagcacataatcggcaaatccactaatcagttcccgcgtatttggcgcgcgaaagcccacggaatagttcatcgcattttccagcgcgtagccttcatgcgggaatcctggcggaatataaagaatatcaccaggctccagctcttcatcgatgatggcttcgaacggatcgacctgtaacagatccggatgtgggcagtgctgtttcatttgcagcttttcgcccactcgccagcgacgacgtccggtaccctgaatgataaacacgtcgtactgatcgagatgcgggccgacgccgccgccgggtacagaaaaagaaatcatcagatcatcaatacgccagtccggtagttcacggaacggtcgcatcagcgcggcggtcggctcatgccagtggttcactgcctgtaccagtaaactccagttggtttcaccgagatgatcgtagctttcgaacgggccgtggctgacctgccatttgccatcctggtgactgaccagtcgactgtcaacttcgctttccatcgccagacccgccaactcgtctggagagatcgggtcaataaaattattaaagccgcgttttaacaccaccgggcgtttctgccagtgacgttcaagaaaatcgggccagttaagagtgagttggtattccatgttaagcatccacaggctggtatctgcaaccgattataacggatgcttaacgtaatgcgtgaagtatgggcatatttattcatctttcggcgcagaatgctggcgaccaaaaatcacctccatccgcgcaccgcccagcatgctctctccggcgacgattttaccctcatattgctcggtgatttcgcgggctaccgccagccctacaccttgcccagggcgtaaagtatcaacccgttgaccacggtcgaaaatgacctctcgcttgcttaatggaataccggggccatcatcctcgaccacaatatagagatgctcgtcggtttgccttgcagaaatttcgacaaactcgaggcaatatttacaggcattatccagcacgttgcccatcacctcgacaaaatcgttctgctcaccgacaaagctgatctctgggctaatatcgagagagatattgacccctttgcgttgatacactttgttcagcgcactggtgagattgtccagcagtggggcgaccggatgcagctcgcggctgagcaatgtcccgccgcgcatactggcacgatgcaggtagtagccaatttgctgactaatgcggctgatttgctccagcattaccggctcagcatcactgacgctcatcttttcactacgcagagaacgcagcgtactttgcagcaccgccagtggcgttttcagactatgggtcaggtcggtgagcgtcgtacggtatttgtcgtaacgttcgcgttcactttttaacaatcggttcaggtttcgtaccagactggtcagttctcgcgttgtggctggattgagcaattcgcggttatgttcttccagttcgcggacttcttttgccagggcttcgatggggcgtaaactccaccaggcggcgacccacagcagcgggatcactaacagcagattggcactgagcacatagataaaccagctccagaccatataggaactttttagctccaccggaatggtatccaccaccacaatggttaattttggcatccggcttgttgccgggtagacgtttactgccacgctgtgggtcatctccgcgtcgtcatcatcttcccgcacttcctgcaactgttgctgtatgctatgatctccactcagcaagaggctggtatcgttaacatccgcttcaatttcatgaaaaccattgcttttcagccagtcaggctggatcatcttcatcagccagggcacgtcacgttgcgcccataaaagctgcccgttctcatcataaattagcgtcatggtggggctttgcttgtcgatattttcgggtaactcgacatgcaacttattgttttcccacttcgcaagggtatagaacagattgctctcgccacgtaacagccgaaacgtagttttatcgaaactgacgctataaccgatcagcgcgaccattccgtaggcaaggctaagcaccagtactaccgctgccgttgccaacagaaaacgtacccgcaggctgagcgggaaaaaaagacgcagtaattttttcatcagcgcaattcgaacagatagccctggccgcgaacggtggtaatcacttcttggggatattgtgcctgaatttttttgcgcagacgtcccatcagtacatcaatggtatggctttcccgcagctccgcatccggatagagttggagcattaagctatctttgctgaccactttgccattattgcgtatcaacgtttccataatagtgtattcgaacgcggtcagtttgatcacttcgtcattaatagataattcacggcgagagagatcaacctgaaacggggggaggctaatgacctgactagccagaccgctattacgccgcattaatgcctgcattcgcgccatcacctcttcaatatgaaacggtttagtcacataatcatcagcaccggcacttaatacttcgactttgtcctgccagctttcacgggcggttaataccagaatcggcagactaacatcgttgctacgccagcggcgaatcagactcagaccgtcctcgtctggcaatccgagatcgacaatcgcaatatccggtatatgttcattgagataataatcggcttctttggcatcttctgcgtcatcgacctgatgaccagcatcctgaatctgaactttaaggtggtgacgtaacaacgcattgtcttcaacaaccagtacgcgcatttttatttctccctgtcttaattattaaaatagtgtaacgcgattatgtggttatgggggtaaacattaaataaaccagcggggaggggaggtaaagtgaaaaaataaaaagcggataatcttaataagcaggccggacagcatcgccatccggcactgatacgaggtttatttcagctcatcaaccatcgtgatagctcgaccaatatagttagccggcgtcatcgctttcaggcgggctttctcttcttctggcaacgccagaccatcgataaactgcttcatgccttcggcgtcaacgcgcttaccgcgagtcagctctttcagcttctcgtacggtttttcgatgccatagcgacgcataactgtctggattggttcagccagcacttcccagttgtgatccagttcatccagcagatggtcacggttcacttccagtttgctcacgcctttcagggtggattgatatgcaatcaaggcataaccgatacccacgccgaggttacgcagcacggtagagtcggtcaggtcacgctgccagcgggaaaccggcagtttgcttgccagatgctgcaataccgcgttggaaaggcccagattcccttcggagttttcgaagtcgatcgggttaactttatgcggcatggtggaagaaccaatctcaccagcaatggttttctgtttgaagtggttaagggcgatataaccccagacgtcacggtcaaagtcgatcagaatagtgttgaagcgcgcaacgcaatcaaacagttcggcaatgtagtcgtgcggttcgatctgggtggtgtacgggttccactgaatacccaggctggtgacgaactcttcgctgaactgatgccagtcaacttccgggtaagcggcgatgtgggcgttatagttaccgaccgcgccgttgattttgccgaggatctccacctggttaagctggcggtactggcgctccatacggtaggcgacgtttgccatctctttaccgatggtactcggcgtggctggctgaccgtgggtacgagacagcagcgggatatcgcgatactgaacggcgagatctttaatgccatcaatcagttgacgccagtatggcaggatcacttcatcacgcgcggttttcagcattaatgcgtgggagaggttattgatatcttcgctagtacaggcaaagtggatgaattcagaaaccgcgtgcagttccgggatctccgccactttttctttcaggaaatactcaaccgctttaacgtcgtggttagtggtacgctcgatagttttgatgcgcgccgcatcttcttcgctgaaactggcgacgattgcatcaaggtaaccgattgcgtcggcagcaaaagcaggaacttccttgatcgctgcgtgcgcggccagtttttgcagccaacgtacttcaacttgtacacggaatttcagcaaaccatattcgctgaaaatcccgcgcagcgcgctgactttatcgccgtagcgtccatcgacaggggaaacggcggtcagactggataattccatagatcacaactccggggttaaatgagcaagaatttgttttgcctgagtggtcaggcgattacgagaaaacatcagttgcagacgtccgccgccgacctggtgccagagcacggcggcgcgaatgcctgccagcagggttgcgcgaactttcgcctgcacttgtgggctttgcagtacagcaggggaaccggtgacctgaatgcgcgggccaagcgggctaatcacatcaacatagatagcagccatcgcgctcatcagcgtttcggactgtaaatcgaagtgttcgagctggcgttgcaggccgttgatccggttgcccagagtgtcgagcgcgcctttcgcactggagagtttgcgctcaagcaccatcaagctgagtgtgtagcgggttaattcggcgtttaagccctggcgactgctggcattgagcacgccgagcagggtttccagcccgacgcgcaggttggcttcgctaccgccaaaaaccgccagcgtgctgctggggttcatatcaataatactgttgagactgacgtgtagcgcatcggcatcacaatgcccctggtgagcgagttgttgcaccaggcgtgcgctctgacaaataccggccagggcgagggtgatgtcatagtaattctttgccacgttcactgcttccttgttttaagtaaagataataatcagaccggcagcggcagacgctgctcaataataccgccaccgaggcacacttcaccgttatagaagacggcagactggcccggcgtcacggcggcaaccggttcatcgaaaatcacttcaatgcgatcatcgtccagcgccttgacggtgcaagggatatcggtctggcgatagcgggtttttaccgtgcaacgcatagtgccggtgaatggttcgcgatcgacccagtgcaactgctgggcaatcaacccgacagacatcagccgcgggtgttcatggccctgagcgacaaccagaatgttgttttcgacgtctttgtccaccacataccacggttcttcggtaccttctttggtgccaccgatacccagacctttacgctgaccgagagtgtgatacatcagcccctggtgctcaccaatttcatcgccatcgacggtaatgattttgcccggttgcgccgggagataacggcccaggaactcgcggaatttacgttcgccaatgaagcaaatgccggtagagtcttttttcttcgcggtgaccagaccaagatcttcagcaatcttacgcacctgcggtttttccagttcgccgaccgggaacaggctttgcgcaatctgctcatggctgagcgtataaaggaagtagctctggtctttattgctgtccagaccacgcagcaggcggctcttgccatcgacatcggcccgacgtacgtaatgaccggtagcgatataatcggcacctaaatcttcggcggcaaattcgaggaaggctttaaatttgatctctttgttgcacagaatatccggattcggcgtgcgaccggctttatattcggcaaggaacagttcgaagacgttgtcccagtactcggcagcaaagttaacggtgtgcagttcaatgccgagcttgtcgcagacagcctgggcatcagccagatccgctgccgctgtgcaatattcctcaccgtcgtcttcttcccagttcttcataaacaggccttcgacctgatatccctgttgttgcaacagccaggcagaaacggaggaatcgacaccgccggacatgccgacgattactttttttgcggtttcagacattggatcactcacgacattgaacttcaaggcggcgtattctatcacgcagccttttagatgacaccctttgtaaaaggccagttaaaatcgccaatcatctccagcggataacgttgcccgctttgataacaacgaatactttccgccaccagcgggctacgaagattactcgcctgtaaaatttcttcggcgctgacccaacggcagcagtcgatatcgctgtcatgaggctgggtcgggcatatttgctcaagctcaatggcaaagaggaaacgcaaaaacggcgttttatctggcgcaatccactgatgcatacgaataaagtgttgcggctgcgcgctgatgccggtttcttcccacagttcacgggcggcggcttccactaaggtttcatcggcttccagatgcccggcaggttggttccataacgctttaccattaatcgtctcttcaacgactaaaaatttgccttctgcgtgcaccacgcaagcaacggtaacgtgcggtttaaacattttgcatccttaatctgtcacttctcgccattcaccattggcaagattatccaaagagtaatcacccatcgcatagcgaatcagtcgcagcgtggggaagccaacatgggcggtcatgcggcgcacctggcgattacgtccttcatataaggtgatcttcagccagctggtgggaatacttttgcgttcacgaattggtggattccgcggccataaccacgcgggttcgtcaaccagctccgcgccggcgggcagggtagggccatcatttaaggttacgccattgcgcaaggcttcaagtgcgtcttgtgtgggaataccttccacctgcacataatagatttttccggtgcgtttacccggctgggttaaacgcgcctgcaacgcgccgttattggtcagcaccagcaacccttcgctatcgcggtcaaggcgacctgctgcataaacaccctgaaccgggatgaattcttttaatgttttgcgtccggcttcatcggtgaactgcggaagaacatcgtagggtttattgaacaggatcacacgcgtgggctggttttcaggtttacgcctggtagaacgttggctgctgaatcgcttaacctggtgatttctaaaagaagttttttgcatggtattttcagagattatgaattgccgcattatagcctaataacgcgcatctttcatgacggcaaacaatagggtagtattgacaagccaattacaaatcattaacaaaaaattgctctaaagcatccgtatcgcaggacgcaaacgcatatgcaacgtggtggcagacgagcaaaccagtagcgctcgaaggagaggtgaatggaaagtaaagtagttgttccggcacaaggcaagaagatcaccctgcaaaacggcaaactcaacgttcctgaaaatccgattatcccttacattgaaggtgatggaatcggtgtagatgtaaccccagccatgctgaaagtggtcgacgctgcagtcgagaaagcctataaaggcgagcgtaaaatctcctggatggaaatttacaccggtgaaaaatccacacaggtttatggtcaggacgtctggctgcctgctgaaactcttgatctgattcgtgaatatcgcgttgccattaaaggtccgctgaccactccggttggtggcggtattcgctctctgaacgttgccctgcgccaggaactggatctctacatctgcctgcgtccggtacgttactatcagggcactccaagcccggttaaacaccctgaactgaccgatatggttatcttccgtgaaaacagcgaagacatttatgcgggtatcgaatggaaagcagactctgccgacgccgagaaagtgattaaattcctgcgtgaagagatgggggtgaagaaaattcgcttcccggaacattgtggtatcggtattaagccgtgtagcgaagaaggcaccaaacgtctggttcgtgcagcgatcgaatacgcaattgctaacgatcgtgactctgtgactctggtgcacaaaggcaacatcatgaagttcaccgaaggagcgtttaaagactggggctaccagctggcgcgtgaagagtttggcggtgaactgatcgacggtggcccgtggctgaaagttaaaaacccgaacactggcaaagagatcgtcattaaagacgtgattgctgatgcattcctgcaacagatcctgctgcgtccggctgaatatgatgttatcgcctgtatgaacctgaacggtgactacatttctgacgccctggcagcgcaggttggcggtatcggtatcgcccctggtgcaaacatcggtgacgaatgcgccctgtttgaagccacccacggtactgcgccgaaatatgccggtcaggacaaagtaaatcctggctctattattctctccgctgagatgatgctgcgccacatgggttggaccgaagcggctgacttaattgttaaaggtatggaaggcgcaatcaacgcgaaaaccgtaacctatgacttcgagcgtctgatggatggcgctaaactgctgaaatgtagtgagtttggtgacgcgatcatcgaaaacatgtaatgccgtagtttgttaaatttattaacgggagcgtaacgctcccgttgttttttgttaggctgctaacggttatcaaaattttatcaaaaaaagttatcaaaacccctcggtagttttggggtaggctggccggtcaggtggtagttctactactagtctcccacatagatattccttagctttttattattgctggcggacgctcgttaatatttaaggtcttcattgattaagacatccccaaagttagttatgtattcactgttattaggacaattatgaattaccactccttacacccgctcaaatattgttaaattgccggttttgtatcaactactcacccgggactcgccaggggacagccaacaggcattgggtgcaatcaccttagcgttcaggtacatgcggaatgtaaaaaaggccgcgagcgcggccccttcacatacatctttagtactgagactgtttaacctagggaattattatcgtattatattgcattacaactcccaacagtgacatatgaacttcctgctttactccacgactttaatatttcaaggccatgtgaagaacatatttcttgcactgcgagttcatcgagtaatccatagtaagaaacactttttgaatttttgtaaatgtatccgtaaagatgttttcttcctgtttcgtattttttgaagtatgagcttttatattgatttacaataagagtctcacctcctgattttagtaatctcttgatgctaagaactatcagataattcaaagcgtggctgtgatgataggaattatgttttttacgtgaatgagaataatcttaaatgaggaataactcattgattgacaatatttttattcaagaagtgtcattgactgttaacgcaatgttgtaaaggtaagataatctgatttatcaatattattgtgtgatttttatgtgagcagaagatattcatcagcaacgattacattagtcattttattttgccgacggcctcattgtcgaaagataagcgtacgacagtattatcagaaaagagtgattttttatccaactacacttcagcgcactgcgtgtaaaaaatgcctctttcttatgcgggatatcatcatttcatcatgatgtctttggtgagcggtgaacacaatgcacctgcgctgtctcttcaggatgaatcccctggtctggtgcctgcgggctgatgttgcagcagagcttaggagtcttagacgctactatcatttatccaatggcatggaaagcaaaagtgtcgatacccgcagtatatatcgtgaactgggtgcaacgctgagttacaacatgcgcctggggaacggtatggaaatgaaccctggctgaaggcggctgtgcgcaaagaatttgtcgatgataaccgggtgaaggtgaataatgacggtaatttcgtcaatgatttgagcggcagacgtggaatataccaggcagctattaaagccagtttcagcagtacgtttagcggacatctcggggtggggtatagccatggtgccggtgtggaatccccgtggaacgcggtggctggtgtgaactggagcttctgaccatcaacgattaaactgcgcttcggcgcagttttcgtttacaggatgttgaaagggaaaattctggggcaaaaaaagcccgccagttacggcgggaaacctcatcctatgggagaacaatgaataatgaaattgcggggttatcatctcccagtatatccatactaacaataaggttatttactcaaccaggcataaacattttgttttgtgcgtgggaacagccttaaggtgtaaagggggaggtggaaatagcaatgaggagtatcagcaagaatactcgccgctttaccacaacgtggatgagagggatgaaaaactcaaggcagagataactctgccttgaagataaatgcgcttttacagcgggcttatttcagctcttctgcttccggtaaggtcacgttcagctcaagaatagaaatatcgccatctttttgctcaagctgtacggttaccatctcaggatcaatttgtacgtatttacaaatgacctcaagaatatctttacgcaactgcggcagataatgcggttctgcatcgctgcgacggcgttcagcaacaataatctgcagccgttcttttgcaatgttggctgtgtttttcttccggctgagaaagaaatcgagtaatgccataacttatcctccgaacaagcgtttgaggaagcctttcttctcttcttcaatgaagcggaaaggacgttcttctcccaacagacgttctacggtatctgcgtaggctttacccgcatcggcgttaatgtcgagaatgaccggttcaccctggttagaggcgcgcaatacactttgatcctctgggatcacgccgacgagtttgatgcgcaggatctccagcacatcttccatgctcagcatgtcacctctgcttacgcggcctgggttatagcgcgttaacagcaggtgctctttaataggctcttcgccattttctgcgcggcgacttttgctcgccagaatgcctaaaatacggtcagagtcgcgtacactggagacttccgggttggtggtaataatggcttcgtctgcaaaatagagtgccattaacgcaccggtttcaatccctgccggggagtcacaaacgataaattcaaaatccatcgctttcagatcatcaagaactttggcgaccccttcacgggtgagggcatctttatcgcgtgtttggcttgccggcagaatatagagattttcagtacgcttatctttaattaacgcctgatttagcgttgcatcgccctgaatgacgttgacgaaatcgtaaacgacccggcgttcacaacccataatcaggtcgagattacgcaggccgatatcaaaatctatcacgacagttttctttcccttctgggccaaaccagtggcgatggccgcgctggaggttgtcttaccaacaccccctttgccgctagtaacaacaataatgcgtgccatagaaattccttgttaaaaagggatcaatttaacggttgaacggtcaaagcgttttcgactaactgcagtcgcgccgctttgccataaaattctgctgggatttgatcactcagccagtattcacctgcgatggacaccagttccgccatcaggttcgtacaaaatatttgcgtttcccggtcaccacttgcccctgccagcgcacgaccgcgcatcatgccatagacatgaatgttcccatcggcaatcaattcggccccagcgctaacgtggcttgtaacaatcagatcacattgtggagcataaatacgctgaccggaacgcaccggggtatctattaaacgcgtttttgtgaccggcgttgtattttgcgctggagcctgcggtgtgggagctggacgtggcgctttttcctttccttccgtcaggataggcagccccatcttttcaatttcggctttaagttgcgcatctttgcagccacttacgccaataacccgcaaaccggttgcgctaaccgccttatgcatcgcactccagtttaccgggtcttccagtgcactgacgttgagtacaacgggggcatgttttaaaaatgcgggggcctgagcgattttgtcttccagcgcctgatggataaccttaggttctgcctcatgcagatgaaccacagataaagtgaagctactgcctttaagctcgattggcgtgttactcatcctggccttactcaattagctattaatcatcgccagcgcgcgatgatgttccgaagactataaggcatgttatagtctggattatattgaggcaagtcaccctcccatttattcagagtaaaagtctattctgtgataaatggcgctgattcatagcttaaaaaatacccttgtcaatcaacccattgccgtcgtacttttgattgttcttatttacgcttcctttttccgcaccctaatcgtgacagcatctccagacctgtttaaatatccagtattgaggcaagtgtattttttcaccacgccaggctttcttaactttccattttttgcggcatcattaaagaacagatacccgttatcttaatatccgccacagaattgctctatcatagaaaccgcagaagacgtctgatacttctgtcaggtcatcgtaactcgtccaggtcagcggttttgattacggattgatgatgaaatgagcataagtgttgtacggttggattatcaggatgtgctatgaatatgatgcgtattttttatatcggattgagtggtgtggggatgatgttcagtagtatggcgtctggaaatgacgctggcggacttcaatctccggcgtgcggcgttgtttgcgacccgtatatttgtgtgaacagtgatggcatttccccagagttaacaaggaaatatctcggcgaaaaagccgctgaaaacttacaaagtttacaaggctacgatcccagcgaatttacattcgctaacggtgtattttgcgatgttaaagaaaaattatgtcgtgatgatcgttattttggtgtggatggtaagcggagtggaaaaatcaatcaaaccaccacaaagatgttatttatgtgtcgtgagtgatgtcttgtttacattatgttctattcgtcattaacctcttgagcgacagagaggagtggggcattaacgtttatgacggggagagtccccgtcggttgacatttacttaatttgaatatcgacgttatattttttagttttgtttttacgggcgtcgtttcgggtttgcaacactcgcagctcatatttgccagaagcagggagactgtattgtccgtgactatcgagttctggggaatatctggataaatcaacactatcatcgattcctggcccgaagaggtaagtatcagcgccttcattagagatactcacatgcactttctgaccttttttggcatagaaggtatatgtatcgtaatcgtatccctttatttcgccggagtactgagcgctgctatggccttttctgaactcaacattgacattcttacccgcagcaaagctcgtggaggttagcagtgcaagcagcaatacagccttcctgatgctcttgattttcattggtagtctcctgttcagaatgagtacgatgaactgttataatataacaatccctaacgggagaattccagtggctttcctgcgttcggtaaaatcacgttgcggcatttttgccggggggattacttataaagggggcatggactcaacaaaccgtagaaatctacagctggctggcttgtggcgcgggtttcattgatgttagcttatgccaaaacctggcatcttaaagagtaaaagtatgttttgtgtgatttatcgaagcagcaagcgtgaccagacctatttatatgtcgaaaaaaaagacgattttagccgtgttcctgaggaactgatgaaaggttttggtcagcctcagttagcgatgattctgccgctggatgggcggaagaaactggtcaatgccgatattgaaaaggttaaacaggcattaaccgagcaaggttactatttgcagttaccgccaccacccgaagatttgctgaagcaacatctttccgtcatggggcagaaaacagacgacactaacaaataaccgatatccggcggtggcattatctttgtcggcgcgggttttcatatccacgataaggtgaggggaacgttatgtatcaacatcacaactggcaaggtgcgctgctggattatccggtgagtaaagtagtctgtgttggcagtaactatgccaaacatattaaagagatgggcagcgcagtgcccgaagagccagtgctgtttattaaaccagaaacggcactgtgcgatctgcggcagccattggcgatcccatccgatttcggtagtgttcatcatgaagtcgaactggcggtgttgattggcgcgacactgcgtcaggctacggaagagcatgtccgcaaagccattgccggttatggcgtggcgctcgatctgacattgcgtgatgttcagggaaaaatgaagaaagccgggcagccgtgggaaaaggctaaagcgtttgataactcttgtccgctttccgggtttattcccgcggcggaatttaccggcgacccgcaaaatacaacgctgagcctgagcgtaaacggcgaacaacgccagcaaggtacgactgcggacatgatccataaaatcgttccgctgatcgcttatatgagcaagttttttaccctcaaggccggtgacgttgtgttgacaggcacgcctgatggcgtcggcccgttgcaaagcggtgatgagctgacagtcactttcgatgggcattctttgacaactcgcgttttgtaatactttttgccgcctgaaagcggcggcaaaacttgcatcgctgtgccagactggttataaggtgcgttttaacgtaatggcggaacacctgatgagcgatgtacctttctggcaaagtaaaaccctggacgaaatgagcgatgcggaatgggagagcttgtgtgatggttgcggtcagtgttgcctgcataaactgatggatgaagacaccgacgaaatctacttcactaacgtcgcctgtcgccagctcaatattaaaacctgtcaatgtcggaactacgaacgtcgtttcgagtttgaacccgactgcattaaattaacccgtgaaaatctgccaacattcgaatggctgccaatgacctgcgcttatcgtttgctggcggaaggtaaagatttacctgcgtggcatccgctacttactggtagcaaagcggcaatgcatggtgaacgtatctctgtgcgtcatatcgcagtgaaagaaagtgaagtgattgactggcaggatcatatcttaaataaacctgactgggcgcagtgataaatttaatagatgctgatgggggctttcttaatatacgtctggatgctcgccatttcgtagccctgtttttgaaagcgctctgtcataatgagagttacccgataccttattatcaacaggtaactctcaatctttaaaaaacgtctgtgtttttaaatgtgataaaccttataccttgagtacatggagagaataatcgcttatcagacttcaggtacctcaaagagtgtctttttaccgtgtcttttctgatactcattacaggtgttaatcatttttttggccgcttcttttagcaaagaaagcattaaatcatcataatcaacgtagaatctggttgtttcagtttccgtttttatctcaccgatggcggctatttcggtggttaatttcaatttggcggcatcgatatctttattcgcttgtttaaccgtgttagacagggtggtaaagaaattctgcacagattttaacttgttcttcaattctggaatcagttttccttcaactacgcccgcagcaatagaataggaaatgattaatccaaatggaccggcgacgacaccggctgcggcaccggcatatgcttccttcctgattttatctacctgactctggaaatagctgcttttttcactaaaatcattggttaactggctatctaacgccagcagtttcccggaagcgttgttgaaactttgactgcttaccagcagggatttttgcgcttcattcagcttcgtgatgccgtcatccagtaccttaatgagaatgtctttctgggcggatgctttcttctcattgtactcatcaaatagcaaaatatacgctgcgagcaattgcgtcgcaacaccacaccattcatacactgtttgggttgcttcaaaatacttatcctggctatccataagtaaggttttaatatcgccgactaaaacggaggctgcctgactatactcctgtttaaagcgacttaactcttttatggtttcatcaaaggtctgccaggggatgacctgatcgagatatttattataaagatctaatgctccatctgcggtttcgattgcgtttttaactacttctaccgttttatctgcaacgatttcagtcataatcattcgcctctttaaatatataaattgtaatgaaactcctgttttacaactattaataaattttacttcatctaattcatagttagccgggcgggatgcgtcaatgtctttatttctattaatatgataaatatcaaacaatgtttaatgtcattatggcgaatgcttctattctattttttagccgggtgatatttttcatttctgctggatgagcgtcgtcgccagaaggccacgtgagcacaagataagagaacgaaaaatcagcagcctatgcagcgacaaatattgatagcctgaatcagtattgatctgctggcaagaacagactactgtatataaaaacagtataacttcaggcagattattatgttgtttatcaagcctgcggatctccgcgaaattgtgacttttccgctatttagcgatcttgttcagtgtggctttcctagtccggcagcagattacgttgaacagcgcatcgatctgaatcaactgttgatccagcatcccagcgcgacttacttcgtcaaagcaagtggtgattctatgattgatggtggaattagtgacggtgatttactgattgtcgatagcgctattaccgccagccatggtgatattgtcatcgctgctgttgacggcgagtttacggtgaaaaaattgcaactacgcccgacggtacagcttattcccatgaacagcgcgtacagccccattaccatcagtagtgaagatacgctggatgtctttggtgtggtgatccacgtcgttaaggcgatgcgctgatgtttgccctctgtgatgtaaacgcgttttatgccagctgtgagacggtgtttcgccctgatttatggggtaaaccggtggttgtgctaagcaataatgacggttgcgttatcgcccgaaacgctgaggcaaaggcgcttggcgttaaaatgggcgatccctggttcaaacaaaaagatctgtttcgtcgctgtggcgtggtttgctttagcagcaattatgagctttacgcagacatgagcaatcgggtgatgagcacgctggaagagctaagcccccgcgtcgagatttacagtattgatgaggcattctgcgatctgacaggtgtgcgtaattgtcgcgatctgactgattttggcagagaaattcgcgcaacggtgctacaacgtacccatcttactgttggtgtggggatcgcccagaccaaaacgctggctaagcttgccaatcatgcggcaaaaaaatggcagcggcagacgggtggggtggtggatttaagtaatctggaacgccagcgtaaattaatgtctgctctccccgtggatgacgtctgggggattggacggcggatcagcaaaaaactggacgcgatggggatcaaaaccgttctcgatttggcggatacagatatccggtttatccgtaaacattttaatgtcgtgctcgaaagaacggtgcgtgaactgcgcggcgaaccctgtttgcaactggaagagtttgcaccgacgaagcaggaaattatctgttcccgcagctttggtgaacgcatcacggattatccgagcatgcggcaggccatttgtagttacgctgcccgggcggcggaaaaacttcgcagcgagcatcaatattgtcggtttatctccacgtttattaagacgagtccatttgcgctcaatgaaccttattacggcaatagcgcgagcgtaaaactgctgacgcccactcaggacagcagggatatcattaacgctgctacgcgatctctggatgccatctggcaagcgggccatcgttaccaaaaagcgggcgtgatgctgggggatttcttcagtcagggagtcgcgcagctcaatttattcgatgacaacgcaccgcgccccgggagtgagcaattgatgacggtaatggatacactgaatgctaaagagggcagaggaacactctattttgccgggcaggggatccagcaacaatggcagatgaagcgagccatgcttagtccacgttatacaacgcgaagttctgatttactgagggtcaaataaatatagcggcaggaaaaaagcgctcccgcaggagcgccgaatggattagcgaccgaacagatcacgttttttcgctttaaacggctgggaaatcaccaccagcactgcgacaatcaggtaagcgataaaaataccgagcagccactgcggcatttccagacctaaaaaatcccactgacgctcggcgcaatcgccagaggcgacaaacacttgcggcacccacttatccagcggcagccattccgggaaacgaaccataaaatcacaggtggcaaacgggctaggatagagctgaagcatggtgtgctcgtaagttaactgcacaccgcggaacgcactatacaaccagataaccatcgctacataacgcagcggagttttcggggcgatcgcgccaatcagcgcagcacccagaacgccgaataacgcgcagcgttcataaatacagagcacgcaaggtttcagtaacatcacatgctggaaccacagcgccgtcagttccagtgccagagcagtaaacgccatcaacagccacgcgccccggccttgactacattggttcaaaaatcgcaacataatcatttccctgcaatatgcatagagtgcgcagtttaaaccaattcattcgctgcgccaccaggaggcagcaaaaataggacgcaattggacaattatcgggcgaaaaggcaaaccgggcatttatatgcccggtaagttgttatcaaagcgttgctatccagcccatttgcataaaccattcggttacaggggcaagcgtaaactcgacgcagagcaagccgacgagtgtcaggacgagggtgtaaggcagggccatccacaccatgcggccataagagaggcgaatcaatggcgcgagtgcagaggtcagcaggaacaggaacgcagcctgaccgttcggcgtagcgacggagggcagattggtaccggtattaatggcgaccgccagcagctcgtattgcttcaacgtgatagcgccactttccattgccgctttcgcttcgttgatataaatcgtccccacgaagacgttatcgctaatggaactcagcagaccgttgaaaatatagaacaggctcagctgagcatgttcgcttgcctgcaacacaaactgaataattgggctaaacagttgttggtcgataatcaccgcgactacgctgaaaaacaccgtcaacagtgcggtgaatggcagagattcggtgaaggctttaccgatagcatgctcatcggtgacaccggtcaaacttgttgccagaataatgacactcaaaccaatcaagccaacttccgccagatgcaacgccagcgcagtcaccagccagacgccaataatcgcctggacaatcagacggattttatcctgacgggtacgctggtggcggctttgatcgtcaaactgttgcaacacttcgcggactttctccggcagcgtttcaccgtagccaaaccaacgcagcttctctaccagcaggcaggttaacaggccacaaatcagaaccggaacggtcaccgggctcatgcgcaggaagaaatcgccaaaatgccagccagccgctttagcgatgatcaggttctgtggttcgcccaccatggtcattacgccgcctaatgcggtgccgacaccggcatgcatcatcaggctacgcagaaagccacggaactgttccagaaccactttgtaatgcttgtcgatatgactatcgtcttgcaggtcggtgtcttcggtacgggaagaggctacgcggtgataaataccataaaaaccgactgcaacgctgatcaccaccgccacgacggttaaggcatcgaggaacgcggagaggaacgcagccgccacgcaaaaagagaggctcagcagcattttggagcgaatgcttaacagcaaacgggtaaatatgaacagcaacagctgtttcataaaatagatacccgccaccataaacatcagtaacagcaagacttcaagatttgccgccacctcttcacggacgtgttccgcgctggtcatgccgatgaataccgcttcgatagccaacagaccaccggggagcagcgggtagcatttcagggccatcgccagagtgaaaataaattccgctaccagcaaccagcccgcgacgaaagggctgatgaggaaaattaacgggtttacgattaagaaaatgatgagggcgagtttgtaccagtcgggggactggcccaaaaaattgcgccatagcgcgcggccccaggagatctccatgatggtttcccttaccttacaaataatcaatgatgtttttatgtttaaacgcaaagcttaacggtcaggcaggagtgaggcaagtcttgatagtcaaggggaaagagatgcggaaaatgaagccttgatccctttttcttctttttgtctgctatcagcgtagttagccctctggtatgatgagtccaactttgttttgctgtgttatggaaatctcactatggtcattaaggcgcaaagcccggcgggtttcgcggaagagtacattattgaaagtatctggaataaccgcttccctcccgggactattttgcccgcagaacgtgaacttagtgaattaattggcgtaacgcgtactacgttacgtgaagtgttacagcgtctggcacgagatggctggttgaccattcaacatggcaagccgacgaaggtgaataatttctgggaaacttccggtttaaatatccttgaaacactggcgcgactggatcacgaaagtgtgccgcagcttattgataatttgctgagcgtgcgtaccaatatttccactatttttattcgcaccgcgtttcgtcagcatcccgataaagcgcaggaagtgctggctaccgctaatgaagtggccgatcacgccgatgcctttgccgagctggattacaacatattccgcggcctggcgtttgcttccggcaacccgatttacggtctgattcttaacgggatgaaagggctgtatacgcgtattggtcgtcactatttcgccaatccggaagcgcgcagtctggcgctgggcttctaccacaaactgagcgcgttgtgcagtgaaggcgcgcacgatcaggtgtacgaaacagtgcgtcgctatgggcatgagagtggcgagatttggcaccggatgcagaaaaatctgccgggtgatttagccattcaggggcgataatcccttccgtttaaagagcaaacccctcaaacgaggggttttttgttgtttttacagatttcccattcttggcgggcaacgttccagcaactcgatgctgccgtcttcgttttgctgttcgagcatcacatcaaatccccacaggcgatgcacatgcttcaggacttctttgcgcccccgatccagcggtgcgcgattatgtggaatataacgcagcgtcaggctacggtcgccgcgcaaatccacgttccagatctgaatattcggctccagattacttaagttatattggctgcttaaccggttacggatctcccgataaccttcttcattatgaatagcggaaatctccagataattatgccgatcgtcatccagcacggtgaagaagcggaaatcacgcatcactttcggactcaggaactggctgataaaactctcatctttgaaatcacgcatcgcgaaatgcagcgtttccagccagtcggaaccggcgatatccgggaaccagtatttgtcttcttccgttgggctctgacaaatccgtttaatatcctggaacatggcgaacccgagggcatacgggttgatgccgctgtaccacgggctgttataggggggctggaagaccacattggtgtggctgtgcaaaaactccagcataaaacgttccgttactttcccttcatcatacagatggttaaggatggtgtagtgccagaaggtcgcccagccttcgttcatcacctgagtctgtttttgcggataaaaatactggctcaccttacgcacaatacgcaggatttcacgctgccaactttccagcagtggcgcatttttctccataaaatagagcaggttttcttgtggttcggacggatagcggcgcgcttcagcaaccgttttctcttcctcgcgcttcggcagggtacgccagagcatattgacctgactttgcagatactcttcgcgacttttctgccgggctttctcttcttgcaggctgattttttgcgggcgtttgtaccggtccacgccgtagttcatcagcgcgtggcagctgtccagaagccgttctacttcatcaacgccataacgctcttcgcactcggtaatatatttacgggcaaaaatcagataatcgacaatgctactggcgtcggtccagctacggaataagtaattgtttttgaagaaagagttatgcccatagcaggcatgagccatcaccagcgcttgcatggtaatggtgttctcttccatcaggtaagcgatacacgggttagagttaatgacgatttcataggccagtccttgctgaccgtgcttatacagccgttcagtctcgataaactttttaccgaaactccagtgcggatagttaattggcatgccgacgctggagtaggcatccatcatctgttcactggttatcacttcaatctggtgcgggtaggtatccagccggtagagtttcgccacccggtctatctctgccagataaacatccagcaggtcgaacgtccagtcgggtccatcgctcaaacgtgtggtgtccttattcatagaatcgatcgtcgccatacgcgcacctcattgttgtcggcgctctctgtgtggagcacctcatttcaagcatagaacacctgttaaaaaccgcgtcgccggagaatttttttctttgcgatttcttattatcagagtgccactaatccgcttctgaacggaattttatgctggataaaaagggcgttcagcaggagatactaaagacgccatattgccgcagagtcagggagatgtgagccagctcaccataaaaaagccgcatgttgaataatattttcaactgagttatcaagatgtgattagattattattcttttactgtatctaccgttatcggagtggctatgcgagttgtcatactgggaagtggtgtggtaggcgttgccagcgcctggtacttaaatcaggcaggacatgaggtcaccgtcattgatcgggagccgggggccgccctggaaaccagtgccgcgaatgccgggcaaatctcccccggatatgctgcaccgtgggcggcaccaggtgtgcctttaaaagcgattaaatggatgttccagcgccatgcgccgctggcggttcgtctcgacggtacgcagttccagttgaaatggatgtggcaaatgttacgtaactgcgacaccagccactacatggaaaacaaagggcggatggtgcgtctggcggaatacagccgtgattgcctgaaagcattgcgcgccgaaaccaatattcagtatgaagggcgtcagggtgggacgctgcaactgttccgtaccgaacaacagtatgaaaatgcgacccgcgatatcgccgtgctggaagatgccggcgtaccgtatcagctgctggaatccagccgcctggcggaagtggagcccgcgctggcagaagtggcgcacaaactgacgggcggcctgcagttacccaatgatgaaaccggagactgtcagctatttacccagaatctggcgcggatggcggagcaggcgggggttaaattccgctttaatacgcccgttgaccaactgctttgcgacggcgagcaaatctacggcgtgaagtgtggcgatgaagtgattaaggccgatgcgtatgtgatggcgtttggttcttacagcacggcgatgctcaaaggcattgttgatattccggtgtatccgctgaaaggctacagcctgaccattccaattgcgcaggaagatggtgcgccggtatccaccattcttgatgaaacctacaaaatcgccattacccgtttcgataaccgcattcgtgttggcggaatggcggagattgttggttttaataccgagctgttgcaaccgcgtcgtgaaacgctggagatggtggttcgcgatctctatccacgcggcggtcatgtcgagcaggcgactttctggactggtctgcgcccgatgacgccagacggcacgccggttgtcgggcgtacacgctttaaaaatctgtggctgaataccggtcacggcacgctcggctggacgatggcttgcggttccggtcagttgttaagcgatctgctctctggtcgcacgccagcgatcccatatgaggatctaagcgtagcgcgctacagccgtggatttacgccaagtcgtccgggccatttacatggcgcacacagctaaggaaacgagatgacccgtccgatacaggccagcctcgatctgcaggcattaaaacagaatctgtccattgtccgccaggccgcgacgcacgcgcgcgtctggagcgtggtaaaagcgaacgcttacgggcatggtattgagcgtatctggagcgcgatcggggccaccgatggctttgcattgcttaacctggaagaggcaataacgttacgtgagcgcggctggaaaggaccgatcctgatgctggaaggatttttccatgctcaggatctggagatttatgaccagcaccgcctgaccacctgcgtacacagcaactggcagctcaaagcactgcaaaatgcgcggctaaaagcaccgttggatatttatcttaaagtgaacagtgggatgaatcggttgggcttccagcccgatcgcgtgcttaccgtctggcagcagttgcgggcaatggcgaatgttggcgaaatgaccctgatgagccattttgccgaagcggaacatcctgatggaatttccggcgcgatggcgcgtattgagcaggcggcggaggggctggagtgtcggcgtagcttgtccaatagcgcggcgactctgtggcacccggaagcgcattttgactgggttcggcctggcattattttgtatggcgctagcccgtccggtcagtggcgtgatatcgccaataccggattacgtccggtgatgacgctaagcagtgagattattggtgtccagacgctaaaagcgggcgagcgtgtgggctacggcggtcgctatactgcgcgcgatgaacagcgaatcggcattgtcgccgcagggtacgccgacggttatccgcgccacgcgcctaccggtacccctgttttagtggacggcgtgcgcaccatgacggtggggaccgtcagcatggatatgctagcggtcgatttaacgccttgcccgcaggcgggtattggtacgccggttgagctgtggggcaaggagatcaaaattgatgatgtcgccgccgctgccggaacggtgggctatgagttgatgtgcgcgctggcgctacgcgtcccggttgtgacggtgtaacttgttgtaagccggatcggaggcaacgtcttctgggtgcaaaaaaatcatccatccggctggtcagcaactgtagttgttaatgtgacagagccattgcccatgatagtgtccattaaaaggatggacactatttccccggaacctgaactcaccgcacaggcgttctacataaaacgcttacgcttcattgttgactcgaactcgacttcagataaatcacgctttacccttgatggagcctgtacatagatttgtgtaattgcctgattttgatatgttcaattcaacatcaaatgaaggttaaattatggacgacaaacaattgcaggctcaggctgcgttcagcaaagcatcgcaaccggcgatagatgcttcattaaatttaagattcagcttcctcttcagccacccgtacgccaatcttcaacacttcattatcttctttctcggccaccgtccagatcatcccggcaaactctacctggtcaccgacaaccggtgccgcgcctaacaactgctggacaatttcacccagcgtttgctgcttatcacgatattctcgcccgtcttccaggccatatatcagcgcaacatcagcatatttggcgctggcttcgagaatgaagtcaccaaagaagcgttgatccagcgcgaccggcgggctctggctgaacagtttaccgagcgccggaagatcgcgttcccgaccaattacacacaacacatcgccttcgcgcagtcgggtgctgccggtaggatgaagcaactggttatcacgaaacagtgccgcaatacgcgtctcttttggcatatgcaaatcgcgcagtgccgcgcccacgcaccatttatcggcactcaattgataaacaaactgctcccacggattttccggatgaatatccaggccaacgcgactcaccggacgtcccactggcggaaccaccactttggcttttttagccgcccagctgagacttgttccctgcaagagcagactaaccagaaccacaaagaaggcgacattaaagaacagacgtgcattctccagccccgccatcatcgggaacacggccaggatgattggcaccgcgccgcgtaatcctacccagctgataaacacgcgctcacgcagattgaaaccgcggaaggggagcaatccagcaaatacgctaaggggacgggcgaagaatatcatccatgcggacaaaatgagcgccggaatggcaataggcagcagatcgcttgggttaaccaacagccccagcaccaggaacatggcgatttgcgccagccaggcgaggccgtcgaaattttgcaggatgccgtagcggttgcgaatagggcgattacccagcagaaaaccgcacagatacaccgccagaataccgctaccttccagcgcagtagttaaactgaaaatcagaataccgccacttaatgccagcaatggatataatccggcgggcagggcgatgcggttgatcatttgcagtagtaaataaccgccgccaagacctattacaatgcccagaccaaattgttgcagaatatcgacaatgaacatccagctaatattgctctcatgatgctggatcatcgcaattagggtaatcgtcagaaagaccgccattggatcattactgccggattcaatttccagcgtgctgccaacacgttcgttaagccccttaccacccagcagagaaaagaccgctgcagcatcggtagagccgacgatagcgccgattaataagccttcaatcaaatcaagattaaacagccacgccgccatcatgccggttaaaccagaggtgataagcacgcccagcgtcgccaggctcagtgccggtcctaacgccacacgaaaggaactggcctgagtgcgcatcccgccgtcgagcaaaataatcgccagtgccaggttacttaccatgtaggcgaaggggtaattatcaaacgggataccgccgacgccatcgactcctgccagcatgccgatcgccagaaaaataaccagaataggaatgccaagacgggaagaaaaactactaagtaatatactgctggtgacaaggatggatcctaagatgaaaaggctaattattgttgtggcatccaacggtcggttactcctgattacgctgtctcttatataaaccctaccatattagcggcagagacagcgttttacttagccctgaagcgtgatttttttacattttaagaacaggatgaccgctaatcgtcaactgagtgccttcccgggtgttattcagaatggcatgtgcgcccaacggcagcgtaaccgtgcgttgttcatgaccaaaatcgaggccggtaatgagtggaatgctcaggcgggaacgcaaaaacgcgtacacactctccaggttgtaacctgcgtcataatcattgggcgtgctgccgctaaagctaccgagaataatcgccttctgacgtggcaaaattcccgcatgatagagctgcaacagcatacgttcgacccggaaagggtgctcgttaatatcttccagcaccagaataccgttctcaatttttggcatccacggtgtaccgatcagactaatcagcatcgcaagattgcctccccacaacgtgccttcggcccgacatgtcgggccttccccttgccattcaatggtgaaggtttcattgcgtaacgccagccagaaatggtgctcggtaaaggcgttcagttcatccgcgccaaagtttgctaccagcatggggccgctaaaggtgatgacattgccatgcgccagaagaccgcactgaatggcggtaaaatcgctatgtccgcaaatgagcaacgggtcatgttgttggcgagccaccagtgcctgccagtcaatatctgccagtaaacgactggcaccgtaaccgccgcgtacagccagcacgatggtgttgggggtagtcagtctggcaagggaattgagatcttccagacgctctgtttccgtacccgcaaaacgctcacaacgacgggcaataacctcgacgttattgacttgatgccccgcgtcggtaaggcgctggataccacgcagcgcggcgtgctgtttaatgcagtaaccgcttggggcaattaagtgaaacagagacatggcaattccttgctgacaacagaaacgaaatgtatatcatgccgcttaggtgtgccgttgtcacctcaacggcgattccaggctataaggatagaagaagtgaaattgagatggtttgcctttttgattgtgttattagcgggttgtagtagtaagcatgactatacgaacccgccgtggaacgcgaaagttccggtgcaacgtgcgatgcagtggatgccaataagccagaaagccggtgcagcctggggcgtcgatccacaattgatcacggcgattatcgctatcgaaagcggtggtaatccgaacgcggtgagtaaaagcaatgccattggtttgatgcagttaaaagctagtacctccggacgtgatgtttatcgccgtatgggctggagtggtgagccgacgaccagcgagctgaaaaatccagagcgtaatattagtatgggggcggcttacctgaatattctggaaaccggcccgctggcaggcattgaagatccgaaggtactgcaatatgcgctggtggtgagttacgctaacggggcaggtgcgctgctacggactttcagcagtgatcggaaaaaggcgatcagcaaaatcaacgatttggatgctgacgagttcctcgaacacgtagcgcgaaatcaccctgcgccgcaggctccgcgctatatctacaaacttgagcaggcactggacgcgatgtaaatcagtcgcgcactttgtccgctttttcccgggcttctcgctcgagagagaaaataatccgctgtaattgccgctccaccgtcgggctgacgttaagaaaacggaagctcagacggggagtggtgatggtttcattcttgccatcaatcactttgcgctcgctgatggagattaactgggcgtcaaagtgaaaaacaccccattgccccatgttgacttcaatctgagcgaagcgcatgccttcttgtaattcggcaggctttgctgtttccagtaatgcgcccatgccgcctaagctcaaatcatacaggcggaaacgtaacgtactgttatccgccagtttggtctggcaaaaataaggcggatggagtggggcggagatgcggaaatatcggcgtcgttgtacaaaccataaggtgggaggcggtacggtaataaatgccggaagctgcaagtattcactctgctgtagttgttcaacagtaaactcgactttcgcaccctgagtttcggcggtaatggtaatgtgctgtgcctttagcacggcgatgttgtcttcggcttgactgccgaaatccagcaccagtttatccggggttattgccagtaatttgctgatcagctgcccgccattccaactgagacgcaaaggaattgcggctttgtgcaaatcgcgtaacacgcccaggacggctaacggattttgtttcaggaactgctcatggtaatgactcacgcggaaaaactcctgactgacaaactgtctttggtttatcggtcacagttaacaaaacttaatacaaatgcgtgaatattttttacatgttgttcttaaatcagccgacatacgcccagcatcgatcccgcccttgcctatacttagagcgttgatgtaagcatttcttgcgtccgattcatcgaaacgagggcctgaacatgggaattattgcctggattatttttgacctgatagccggcattatcgccaagctaatcatgccggggcgtgatggtggtggatttttcctgacctgtattctcgggatagtcggtgcggtggtcggcggctggctggcgaccatgtttggcattggcggctccatcagtggttttaatctgcacagcttcctggtggcggtggtgggagctattctcgttctgggcatattccgcctcctgcgaagagaataagattttcataaggcggatagcgatacagatgccgctatccgctttcacatcagaacgtatactcgacacctgctttacgggtgaaaaaaatcaatatagcacttcgatatccgataaagtcggttcccggtaacaacaacagaatccttttttaattattgtttcgttgtttttggtgtgattcagaaaataaatattttagacagtagccagagtggcgttaaaaatggggcggatagtgaggcggttttggctgcgcttattgaacatttagaattgatcaatccttctggcagattaagccaaaatacccgtagcgcaatgcttcagttacgcgaagaggaatggtctgaattctttttttggttgctaaattctctggagtgtctggattatgtgattattaatttaactccagaaagcaaaaaaacgttgatgagtgaacaccgtaacaatattcaggtagcaattgatgctttatatagccaacgtcggcgtaaaagcccgggtgatgaaagtgaaacacttacccgtagaaatgacgctatcttcggcaaccacgtatggcaaacatttgcgcaatacttcccgccaggacttgaaaaaccgtctgtgtaaaaaaaaccatagctatggtgttatctgccgacaacgccatccggagaagccgaatgacgttgtcggagtaagcgctggttaaggtgtgggttgtgcctctttggtactgggttgcgtcgttgcactcttaacggtcggacgcgtcgccggaacattgtcacacggttgctctttcgggcagatcaaatccagcattttcagcgtcacgccattggtccagccaaagccatcctgtaatggatattcgccaccgccgccccccgttccggtggtgctgacatcatatttttccaccagctttttctcccggtcataggtgtgctgaacattggtcaggaagtgccagctaatgtccatcgccacctctttttgcccgtagttttgtaatccttctgtcgcgacccactgtaacggtgcccagccatttggcgcatcccattgttgcccacttttcacgctcgtggtgttcaggccgccgggttgcagcagatgtgttttcgtcgccgtcgccattttgttggcgcgatctttcgctgccgcattgacgtacagcgggaacagggcggccgcggttaactgattgcgcactttatgacttttcaggtcgtaatcggcataccagccttgttgatcgttccacaggtatttttcgatccctttttgacgggcatttgccagcgtttcgtactggtttgccatcgcgttatctccggcagctttgctggcgcgggcgaggattttttccattttaaacatcaggctgttcagatcgaccggtacgatgctggtggtgcgtaaggtatttaactgctgcgggttgtccatccagcggctgctgaaatcccagccagacgcagcggcagagcgcaggtcgcggtaaatttcagtggcaggtcgattcggattgcttttggcggtggcaatatcttccacccaactctctggtcgtggcgtatcgcgatcgtcccagtagcggttgagaagggtaccatcctgaagtttgacaacgcgtttttcctgttgtccggcttgcaggttttcaacaccgtccatccagtaagcatattctttttgcatttgcggcaggtattgcttcaacgcggcatcgccttcatgctgcgccagtaactctaccatcagggcaaagaagggcggttggctgcggcttaaatagtaactgcggttgccgttgggaatatgaccgtaagtgtctatttcatgagcaaaattggccaccatatccgcgactttatcccagtgaccgctttcggcaagtcctaacatggtgaagtaactgtcccagtaatatacctcgcgaaagcgtccgcccggcacgacataaggttccggcagcggtaacagagaatcccatttttcggtgttttcggtagaacgcgttaataccggccaaagtccgtcaatatgttcgcgcagactctgcccctctggcggaacatatttctcgccttctttcggcagggtgaaattgacgttaacgaaatggcgcagatcaaatccgctctggttttgctgcatccgataatcagcaaggatcatcagcggatcgctgttcggcacggcatcggcaaaggttttttggtccggaaaaagtttggcgttttgcacatcattaaacagcggccctaataaaatatcaggcggctgtggtgttaccggtgtttcttctgcctgcacgcttagcgcagcgaaacacaaaaagatacaggctggaattaacgccattttttgcgggcgagaaggtgcgggggatttcatcaatcattctcctttggcgaaaccgaataaaacggtattcaagtatcagaaaaccttagttcaggatcgcactagctgcatgatcgaaatctcattctgcgaactgtcaggcattttagaaaagggaattaaagggataaataacggcgaaatagagtgatcaaataacgtctgtttattagccagccagcggcgttgggttcgtgattagcgaagaaaaatcatcataaattggtgaaaaatataacaggtagttaaaaaccattagtgctgagtaaattgccggatgacatcagaacgatgccatccgaacagtggcttaaccctgacggttgaaacgttgcgttttaacgtccagcgttagcgtttcttctggttgtatcgcatacagtttctcaccctgctggcaaatccagccaatccccagttcacgggcgattagggcgctgtgggataccggacttccggcgctaaggcagataccttttacaaccgccggatccagttgcagtactgtggaaggataaatgttctccgccagtagaatagttgggctgttaaactgcgggagttcttctttcgtttgggtcaggtggaccagggtgcgatgcagaagatcgtccacatcaatatagcgagcttgtagatattcatcatccagttgctggtattgctggctaagttctttaagaacttgctgccaggcatattctgccgtgcaatgttcatgctgaaggagttcgcttgccgccgccagcagttccggatcatctaacagtgtatggtgaccagaaaagattgcggcaatatcgtcaagcccgctggcttctgctttcgctgttaacgtcatcagatctaataacgtgaagtcaatagcctggcgtaatcgatcttgttcttcttccacggtcagggtactttttgcctgtaccgtacataaaactggttgataataaaaggctttaccgctaacaggcggaacgggacgcagagtaggtggagcgacttcctccgtttcaccaaagttatcttcagccagctgacggaaagcgatcagtgcctcttcagcttctggccctttcgcaatcaggcgcagcgtatcgttatagcgaacttgtagtaacgcaatctggttaatactctctggtgtgacgcatttgccgtttttttccagcaacatatcggcattaaatgtgcttaaggtataaaccagccgggaggccggacgtacatgcaggccgttacggttttttatgaccaccgccagagaacgggcttcttcatcgtacgcaggacatgtgtcagagatttcagtgtcggaggacggtaaacccagttgttcacgtttggcttccagcgcatgcatggcgtcaaagataactttgtcgatatccgccccgctggccgcgctgaccgttgctgccagtgtaccttcgaccaacggcgcagcacacaaacgtacttttgcggcgatctcgggagccagcaattccagcgcagtttcagcactcaataatgcgctacccatatccatcatgaccagcacatggtcggcatcagcaacagattcgatggcctccatcactttgacggcatcggtaccaatgggattttgtggatcgtcaattcccgcggcaatggcgattttacaactatcactcattaacatctgacgggctaattcaccgacaccttctcccagtcggctgctatgactaactatgaccaggtttaccatcaccaattccttactcttttgcggctaacgccaacatttgcatcataaacatcacgctggtcgcgccgggatcctggtgaccaatactgcgttcaccgagataactggcgcggcctttgcgggcttgcatcgtaatcgtactttgtgcagcggattcggcgatgctactggcagcttcgagcgccaccggaacagagagattttgctcgctggactgacgtaagctttccaccaccggcacccacacatcacacatggttttatcgccaggttcggctttcccgcgactgattacgccgtccgcgccatcgcggaacatctgataaagctcttccagtgtcaggctttgccgtgcctgggtcgcctgtgcggcgcggataaagaaggtaccgaacagcggaccactggcaccaccgacgctggaaagcagcgtcataccggtattcttgagaatgaaaccgatatctttatctgcgatagcagggagtttttccaccactttgctaaagcctcggttcatatttagcccgtggtcagcatcgccaatttcgcgatccagtccggtaagatactcgctctcggtgctgaaaatatcgccacaacgagtgagccagttaacaatttgagttctgctcagactcattgctttctccttatttaccccagttaagggccggggtgtggaccggggcgtcccagagtgccagcgtttcgtcatcaactttcagtaaggtgatactgaaaccggtcatatccagactggtgcagtacgcgccaattaaattacgttcgatagtcaatcccgcttgctggcaacgtgtggtcaggcggttatagacgccgtacagctcagaaagcggagttgcgccaagattgttaaccagcgcaatcacccgatcgccagactggagcggttgtttggtttgttgttcttcctgccaactgccttgttgataatcccagaaacgcaaagtgcgatggtaactgccatttaccagcagggtgtcgaacatttcatcgacggtttgatcaagggaagagaaggggcggcggtcaatacccggctcaccatgaatgccgacgccaaactccatctcattatccgccagggtaaaagaaggtttgcccgcggcaggaacggtacaggcaccgagagcgatacctatactgtggccttgattattcagcttacgccccagttccgcacaggcgtccagactgtcgccacgctccgccgctgcgcctacgagtttttcaattaatacggtgttggcaacgccgcgtcgcccggcagtataaagactgtcttttaccgcaacgtcgtcatcaatgaccacagtggtcacttttacgccgctatcgtgcagtaactcggtcgctgtttcaaagttaagaatatcgccggtgtaatttttgataatcaacagtacaccttcgccgccatcaacttgcatggcgcattcaaagattttatcgggcgtcggactggtgaaaatttcgcccggacaggccccgctaagcatcccctgaccgatataaccacagtgcatcggctcgtgtccgctgccgccaccgctcagcagggcgacttttcctgcaacaggggcatcagctcgggtgacatacaccggatcctgatgcagtgtcaggcttggatgcgctttcgccagtcctgccagttgttcgtccagtacgtcttgcacatcattgatcaattttttcattattttgctccagcaattacggtagggcatggatgatgttcaacgacacggcgaccactgactgccgatgaatccattgtgcatcaggcaagggaaaagaaaattagcccaaattatgtttcatagtgaaacatatgctttaatgaatgttccatattgaaacttttacgtgtattaatacttaaaattgcgagccggaacaccttttgtcataagggatgcgggatatgagtggcgcttttaacaacgatggtcggggcatatctcccttaattgcaacctcctgggagcgatgcaataagctgatgaaacgggagacatggaacgtaccacatcaggcccagggcgtgacatttgcttctatttatcggcgtaagaaagcgatgctgacgctcgggcaggctgcgctggaagatgcctgggaatatatggcaccgcgagagtgtgcgctgtttatcctcgatgaaaccgcctgcattctcagccgtaatggcgatccgcaaaccttgcagcagctaagtgcactgggattcaatgacggcacgtattgcgccgagggaattattggtacttgtgcgctaagcttagcggctatctctggtcaggccgtgaaaacgatggccgatcaacatttcaaacaggtactctggaactgggccttttgtgcaacgccgttgtttgacagcaagggccgattgacgggaacaatagcgctggcgtgtccggttgagcaaactaccgcagctgatttgccgttgacgttggcaatcgcccgcgaggtcggaaatttactgctgacggacagtttgctcgctgaaactaaccgtcatttaaatcaacttaatgccctgttagaaagtatggatgatggcgtgattagctgggacgagcagggtaatttgcaatttattaatgcccaggcggcgcgggtcttgcgccttgacgcgacggcaagtcagggacgggcaatcactgaactcttaacgttacccgccgtattgcaacaagcaataaaacaggcacatccgctcaaacacgtagaagcaacctttgaaagccagcaccagtttattgatgcggtgataacccttaaaccgataatagaaacgcagggaaccagctttattttgttgctccatcctgtggaacagatgcggcagttgatgaccagtcaattaggaaaagtcagccataccttcgctcatatgccacaggacgatccgcaaacccgccgcttgattcattttggtcgccaggcggcgcgcagtagctttcctgtcctgctttgtggagaagagggcgtgggcaaggcactgctaagtcaggcaattcataatgaaagcgagcgtgctgcaggtccttatatcgccgtcaattgtgagttatatggtgatgctgcgctggcggaagaatttattggtggcgatcgcacggacaatgaaaatggccgtctgagtcggctggaactggcacacggcggcacgctgtttcttgaaaagattgaatatctggcggtggagttacagtctgctttgcttcaggttatcaagcagggggttatcacgcgactggatgcgcggcgtttaataccaattgatgtcaaagtgattgcaacaacgaccgcggacctcgcaatgctggtggaacaaaatcgttttagtcgccagctgtattacgcgctgcatgcatttgaaattaccatcccgcctctgcgtatgcggcgtggcagcattccggcgctggtgaataacaaattacgcagtcttgaaaaacgcttctctacgcggctgaaaattgatgacgatgccctcgctcgcctggtttcttgtgcatggccaggcaacgattttgaactttacagcgtcatcgagaatcttgctctgagtagtgataacgggcgcattcgcgtcagtgatttgccggaacatctgtttaccgagcaggcgacagatgatgtcagcgccacccgcctttccaccagtctgagttttgcggaagttgaaaaagaggcaattattaacgcagcccaggtcacaggcggtcgcattcaggaaatgagcgctttacttgggatcggccgcactacgctgtggcggaaaatgaagcaacatggcattgatgcagggcagtttaagcgccgggtatgaaagacagaaacgatttctgatacatcagagtgatctgtatttcattccggcgcacgctaacaattttcagcatcgtttaagggcttgtctatcccgcacttaaaagctgaagcgatatcctccgttgacttgcttctgatcaaagaggttaccctgcgtgtaatccgcttcgagatagaatgtgtgctgtttgttatactgtgcactgactcccacgccgttattccagccattacctttgaaactgtacttctcccgggagttgttcaacagatattcggtatccccactaaactcgcggatagcgccagtcttcacatagacattcagctggctgttgcctgcggtgatgtcataccccagtatcatgctggcacgccccagcaggctttcgtagtgattcagatgtatattgaggccattactcgccttcatagtcatctcattctggtggctgtatgtaagctgggtttgcggctctatatagaacccataaccagtaggggacaggttgaacctctgcccggcttccagggagatgctcattccattcgcagtgccgttggcgttaacgccgttgttctgactgtccagtacgtggaaactatttttctggcggcttgcttttataacgagatcgctgtaaaaaccgttttgtgccatgtaactggcgtacattcccatgtagtcactacgtgcggtaccgtcgcctccgctatagtccgggcttgcatgtgtactgccaatatacagaccgacatacaacggcattacatcagagagacgtttatccccaccaaactggataccgctgtaacccatgtcaaagccgctcagtttgccactggcaaaggagtccaggcttcccccataactgcgcaaccagatattaccgtctttactctgatttcgcaggtcacccatccgttgcatcagcgtacggttttcaacatagttcaataagtaaccgacattgagataattgccgccagcatctgcggtcgtggtgggtttaggcgtgggagcgggttcaggcgtaggatcggggttgactatgggaggctgagcgggagctggtgtgggttcaggattaggagtcggttccggaactgtcccggaagcgtaaagctcccagttagtgccatttttacgcacatcgtacagatatccccccaactcaacctgagaagacgcgctgaagctggccgcgccgtcagtggtttttaccactgtcagaacttcatttcccgttgtggcctcgctgccctggttgcggatagccaatacgtgattaccagcactactcccgctgatattcaataaatcccctttattattaacgccattaccctcgccaacaacatcagcacgcataataaaggtactgttaccgctcaggttctctacgtttaatgtggcaaatgtgccggcagtactcccgtggctggcaaaatcgacagtactatggctcagcgccagcgtgtcgagattagaattacttgttacgttccagacgctgttattcattgcaacgtccagttttccgccattgacattatcgctgagggaggaacctgtccaaacgttcccagggtgcatatccagattgattagcccacctttggaaagaacgctaccgttgataagcatacgaccgctggcgttgatgcggctggcggcataaccatcgtcatgttgcgttgcgatggccatctggtcgggtgtactcatatcaatgaccagatcgctcgtgaggtcgatctggctgttggtcatggcataaattcccctggctcctgccgcgccggtgatagccaaactgtctccggttattctaccgccgctgagagcccacaaacccagcgccagactgccattacgatcaactgtaatatcggtattttgcatgttgacaacagccgttgccgtctgggcgctggcaccataagaaccgccggaaaagatgctgtttcgttgcgctgccgtgccagtaaaattgattatcgcgtcactaccactggtgacgaggccaccgccctgcgcggaagaaatatggctatctgcaccgatagtggttgtaccaccacgaacttcgacgccattggccgcggctccagttacatcaacagtgagtgcattcgcgctaacctggccaaagctccagaggccgtgagcattatcgccattggttttaatggtactgtttgttccgagatcgacaacagagtttttctgtacgtttatccccatggcgctgtagccctgaacatcgattgtcaggtctgtagccgtaaaacgcgcagcaccattggcgttattgccgttgagaccaccgatataaacacctgtacttccatcggtcgtgattttacttccgcttccaagatcgacactggtgccatagtcattgatggttaggcctataccgttgctgttttcaatggtgaattgagtggctgttagtgtactgctatgcccaataatgatgccgtcatcgttactcttaatggtgctgcctgtgcctaagtcagcatgggtatagtcaccaattaagttaatgccgatggcagaggtttgaccaacaacatctactgtgagtcggttagctgtcagggagctgtttttgccctgaataatgattccttttgcatatccagaggcgtcgttgacattgacggtgacatcattacccaggttgatattgccaggcgtgtttcctgctggggtcattacaccatagaggtttccacttggatcggcggtatctcctgtaattctgtcaccatcattaatagtaatattggtgccatattgacttcctgtatcagcagctatcagcaggggggaaaagataattgcattcaaaccaatagcgccaaattttatcagttgaatactggggctacggatttttaattcagcgagacgatctgctttggtattcccattgtgttgtttgatgcccataccactcctatatagtacccagactatgggtctatggattttgtcattttgtttaaatcaatgaataatatcctcttatcatcatgatatttgtatggtgcaatcatgatgagcttctcagagaataattctctattaccgggcaaaatcaggaacacaggaattaatatatatttaacatcccccttacaaaggtgagtttatatcgagttattccctaagttgtcgttacttattccaattcgttactataaatatggcaaaaatattacaacaaacagcggttaaaaaatttggtgaagattttttgtaataatcctaattagttatgggaatttcgcttgatgtatctgcataacaaaaacaatatgcgccatttttgcattactaataagaaaaagcaaaaaacatcgatattcatttttggtcaatgggttttctggcctatcgttgttattgtgctactggttatcattttcatcttgccagcatattggagcgtgatcaattttgatcagctgtgaagggggctgatgtgtagtgatacaaaaacttacgttatatcactgctaatgagatatccggcatctgaacacttatgtctttaattattctcgtggttcactataggcaataagcacaaaagtgtaggatgttacaagaatgattaggactcggtgaaatgaaaaatccacgcaattgcgtggattttatatacttttgcgctcttcatgagatttagcgaaacctcatgagacaataaattaattagacgttgaaaaggaagttcatcacatcgccatctttcacgatgtaatctttaccttctgcacgcattttgcctgcttctttcgcgccttgttcacctttgtaagtgatgaaatcttcaaagctgatggtttgtgcacggataaagcctttttcaaaatcagtatggattttgcccgctgcctgcggcgcggttgctccaaccggaatggtccatgcacgcacttctttcaccccagcggtgaagtaagtttgcaggttcagcagtttataaccggcacggatcacacggttcaggcccggctcttccagcccaagctcctgcataaactcgtcacgttcttcgtcgtccagttcggcaatgtctgcttcaacagcagcacaaaccggaaccacaacagaaccttctttcgccgcgatttcacgcacctggtcaagatatgggttgttttcaaaaccgtcttcgttgacgttggcgatgtacattgttggtttcagcgtcaggaagctcaggtaacgaatagccgctttctcttcagcgcttaaatccagcgcgcgcagcatacctgcattttccaactggggcaggcatttttccaggaccgccagctcagctttcgcgtctttatcgccacctttggctttcttctgtacgcgatgaatcgcacgttcgcaggtgtcgaggtctgccagcgccagttcggtgttgataacttcaatatcgtcagccgggttaactttgccggaaacgtgaatgatgttgtcattttcaaagcagcgaacaacgtgaccgatcgcttcggtttcacggatgttggtcaggaactggttacccagaccttcgcctttgcttgcgccttttaccagaccggcgatatcgacaaattccatggtcgtgggaagcgtacgctgcggttttacgatttcagccagttgatccaggcgaggatcaggcattggtacgacgcctgtgttcggctcaatggtgcagaatggaaagttggccgcttcaataccggctttggtcagcgcgttgaacagggtagatttcccgacgttgggcaaaccgacgataccgcatttgaatcccatgatttaaatcaccttaatatcttaataatcaacctgttattgctaacagattgcagaaatggaaataactttgcctattatacacggcactcggcaaaaatgccgcagacaacgacttattgcgctttaaaggcgtgcaatcggttcgttgctttggtcaagccatctgtaaaccacatttcagtacaacgcgccgcttcgtcaatggcttcatcaattaacttctgttcactaacaggcggtttgcctaacacaaaaccgacaactttatttttatcgcccggatgaccgattccgatgcgtaaacggtgaaagttagggttattacccaatttactgatgatgtctttcagtccattgtgaccaccatggccaccgcccaatttaaatttggcgacgccaggaggcagatccagttcgtcgtgggccaccagaatttcgtccggattaatgcggaaaaaactggccatcgccgcaacggctttgccgctgagattcataaatgtagtcgggactaacaggcggacatcttcgcctccaagagtgactcggctagtataaccaaagaatttagcctcttcgcgcagcggagcgcgcaaacgctctgccagtaagtcaacgaaccaggtaccagcattatgtcgcgttgcggcgtattcagcaccggggttcgccaggccgacaatcaatttaatcgtcacgtttttttgtcctgagtgtgtacataactggcgcgtagtttactggttgcggccccgcttgacaaaaaactgcgtatcaaatgcagataacgtaataattgcctgagtggactattagaaagtcaaggtgttcaggcgtttatttgtaaagttttgttgaaataagggttgtaattgtgatcacgcccgcacataacccactgggtgttgtctatactttacacataaggaagaggggtattccctgttacaacccagaaagttccggaggtgacatatgaaacgcaaaaacgctagcttactcggtaacgtgctcatggggttgggtctggtggtaatggtggtcggcgtggggtatagtatcctcaaccagttaccacagtttaatatgccccagtatttcgcacatggtgcagtgctaagtattttcgtcggtgccattctctggctggcgggtgcccgtgttggcgggcatgaacaggtgtgcgaccgttactggtgggttcgccactatgacaaacgttgccgccgtagcgataatcgccgtcatagctaacaaataatgcagtttgctgaccagtcagtttgcgctgactggtcaatctcgtacttataaatccgccatcgccgcgcgacgattcgggaagaacgccaggcgtcccgggatcggttgaatgccagcgcgagccatagtgcgcagtggctggaattccacgttgcacacgcgcagttcacatccctcgggcagacgcttcacaaaacgctggaacgcatcaagaccaccagcatcaagtaccggaacggcatcccacttcagaatcacaatccgtttgccttcaagacgactctccaggtccgtgaataagccttcagcagcagcaaaaaacagcgggccaataacgcgcagaaccaggacatcgtctggaacatctacgactaccggtgccaggcgagtcatacgtgcgatacgacgcataaacagcaggcttgccagcacgatccccacgctgatggcaataaccatatcaaacaacacggtcaggctcatgcacagcagcatgacgatgatgtcatctttcggcgcatgacgcagcaagtcgaccactttgtgcgcttcactcatgttccacgccaccatcaacagcagggctgccatggcggaaagcggcagccaggagagcagcggtgccagtaccagcagggcaagaataaccagaatagagtggatcaccgcgctgataggggacgttgccccggcacggacgttagcggcagaacgcgcgatggcagctgtagcggtaataccaccaaagaacggagcgataatattccccagtccctgtccaaccagttcgctgttcgccttgtgtttcgtcccggtcataccatccagcaccacggcgcagagcagagattcgattgcgccgagcattgccatactgaatgccgcaggcagcagtgtgcgaatagaatcccaggttagcgtgaattcactattaggcagatcccacggcagcaccagttgcggcagcagttgcggaataccgttaccctgagaaccatcggccaggacgtagtggaattggctaccgatggtagcaacatgtccgccgagcaggttaacaatccccatcaccgcgcaaccagccagcaaggccggaaggtgaccgggtaaacgaatgcccagacgcggccaaaaaacaagaatacctagcgtcacaatgccaatggcagcatcacccacattaatggtcggcagcgccataaataatgcgccgactttttgtagataatgttccgggacatgggccatttgcagaccgagaaaatctttaatctgcatggtaccgatggtgatcccgataccgctggtgaaacctaaggtgacggaaaccggaatatactcaatcaggcgaccaaagcgtgccagacccatcagaatcaaaaagatcccgctcagcaaggtcgcaaccagcagtcctgccagtccaaactgttggctcacgggatagagaattaccacaaatgccgcagtcggaccggaaacgctaaagcgactcccacccgtcagagcaatgacaatccccgcaacagctgcggtatataaaccgtactggggtgccacaccactaccaatagccaacgccatcgccagcgggatagcaataatcccgacggttatcccggcaatcaggtcacgggtaaaccgtgcggcagtatatttttctttccagcaagcgtcgatcagagcgcggaaaggcatcacatgactggaaaatattttgttcacaataatgtttcatccgtgagcgcatcatctgtcaactaaatggcaggtgaaggaggcataggtcatacaaatggatattacagacaaaaaaacccgccgcagcgggtctttgagccgggttcgattagtgttcgaacatggcagagatgctttcttcgttgctgatacgacgaatcgcttcggccagcataccactcagggtcagagtacgcacgttcggcagacttttgatttcatcgctcagcggaatggtatcgcagacaacgacttcatcaattacagagttacgcaggttgttcgccgcgttgccagagaagatcgggtgagtcgcgtacgcaaatacacgtttagcaccacgttctttcagagcttcagcagctttacacagcgtaccgccagtgtcgatcatatcatcgaccagtacgcagtcacgacctgcaacgtcaccgatgatatgcatcacctgactaacgttcgcacgcggacgacgtttgtcgatgattgccatatcggtatcgttcagcagcttagcgatagcgcgggcacgcacaacgccgccgatgtccggagaaaccacaattgggttatccagattcagctgcagcatgtcttccagcaggatcgggctaccaaatacgttatcaaccggaacgtcgaagaaaccctgaatctgttcagcgtgcagatccactgtcagcacacggtcaacaccgacgctggagaggaagtctgcaaccactttcgcagtgattggtacacgagcggaacggacgcgacggtcctggcgcgcatagccaaagtaggggataacagcggtgatacgacctgcggaagcacgacgcagggcatcaaccataacgactaattccatcaggttgtcgttagtaggggcacaagtggactggatgatgaaaatatcaccaccgcgtacattttcattaatttgtacgctgacttcgccatcgctaaagcgacctacagcggcgtcgccgagactagtgtacaggcggttggcaatacgttgtgctagttccggggtggcgttaccagcaaaaagcttcatatcaggcacgagaagaacctcaggcatgcgtccattggtggaaagaatctgccgaaaactgtgcgggccaggcatgatcctttccaggcggtgtattaaagagcgcgatgcaacgtctggaacaaggtgacgttgtcaccgaaactcagcttgcccggcttaaagcatggctctgtgcaatggggaaagattagcgcctttcgccacaaagccattgagccattccggggcttgctctagcacctggcgggcttcagactctgtatcaaattcagcaaagacacaggcccctgtcccagtcaggcggctcggggcgtattctaacagccaggaaagcaccgcatcaacctcgcgaaaacgttttcttgcgataacctcgcaatcattgctgaattcacattttagcaacgtttctatactcctttttggcgtattgcgcgggagttcaggatctttaaaaatcaccggagtcggaatacttacaccagggtgcgccaccagataccacttctctggcggatccaccggcgttagtatttcaccaacgccttcggcaaacgcggcatgcccccgaacaaagacaggaacatctgcgcccagcgtcagccccatttccgccagctcatccatgcttagcccgcattgccagagatgatttaatgccaccaggaccgtcgcggcattggaactaccaccgccgagaccgccgcccatcggcaaacgcttgtcaatgctgatattcgcaccgcttcccgtcggaagacgcccgctgtctgccgcagttttcatcaacaatcgcgctgcgcgaacgatcaggttatcttcatgttccacgccttcaacgggcgttaacagacgaatatccccatcgtcacgaagctcaatgctgatggtgtcgccgtaatcaagaaactgaaacagcgtttgcagcgtgtggtaaccatccgcacgctgaccggtaatgtataaaaacagattaagttttgccggagagggccactgtgtccgcattatttcactatccagttatccatttttaacttgatgcgttgaccaccgtcggtgagttccatattggctggcatcgcaggttgcgttttggtgtcataaccaccataaacaaccttccagtttttgccattctggctgtaggtaatttcgctcaggcggtactggtcgtccagtttgtagtcggttgcatcacccggtaaacctaaaatccactggcgcaagctgttgagcggaattggcattccggtcaatttgccaatcatctcttcggcgtcatcggcggtataacgctgacctttattgtcgactaactgcacgttacccggttgagcattcagctccagttccgtgctgcccaatgggttagtgagcagcagacggtagcgatcctggccggtttgctgccagaaaaagcgggcgtacactttttgttggtcagaaatataagcgaacgcgccgcgagtctgatactgattaagattgcgcacgtcttgctgatgctgacgccattgtgggctatccgggcttttgccaggacctttgggcgtggtaacggaacaggcagtgagcacaagagcagccagcggtagcaggcggataagacgaaaatcgggcaggggcatagtgatgacaagtccttgagatacgttgcagttataacccttaatgctagcgttaccgtccgctatcgtctatgttcaagttgtcttaattgccagaatctaacggctttcggcaattactccaaaagggggcgctctcttttattgatcttacgcatcctgtatgatgcaagcagactaaccctatcaacgttggtattatttcccgcagacatgacccttttagcactcggtatcaaccataaaacggcacctgtaagcctgcgagaacgtgtaagctttagcccggataagctcgatcaggcgcttgacagcctgcttgcgcagccgatggtgcagggcggcgtggtgctgagcacgtgcaaccgcacggaactttatcttagcgttgaagagcaggacaacctgcaagaggcgttaatccgctggctttgcgattatcacaatcttaatgaagaagatctgcgtaaaagcctctactggcatcaggataacgacgcggttagccatttaatgcgtgttgccagcggcctggatagtctggttctgggggagccgcagatcctcggtcaggttaaaaaagcgtttgccgatagccaaaaaggtcatatgaaggccagcgaactggaacgcatgttccagaaatctttctctgtcgcgaaacgcgttcgcactgaaacagatatcggtgccagcgctgtgtctgtcgcttttgcggcttgtacgctggcgcggcagatctttgaaagcctctctacggtcacagtgttgctggtaggcgcgggcgaaactatcgagctggtggcgcgtcatctgcgcgaacacaaagtacagaagatgattatcgccaaccgcactcgcgaacgtgcccaaattctggcagatgaagtcggcgcggaagtgattgccctgagtgatatcgacgaacgtctgcgcgaagccgatatcatcatcagttccaccgccagcccgttaccgattatcgggaaaggcatggtggagcgcgcattaaaaagccgtcgcaaccaaccaatgctgttggtggatattgccgttccgcgcgatgttgagccggaagttggcaaactggcgaatgcttatctttatagcgttgatgatctgcaaagcatcattagccacaacctggcgcagcgtaaagccgcagcggttgaggcggaaactattgtcgctcaggaaaccagcgaatttatggcgtggctgcgagcacaaagcgccagcgaaaccattcgcgagtatcgcagccaggcagagcaagttcgcgatgagttaaccgccaaagcgttagcggcccttgagcagggcggcgacgcgcaagccattatgcaggatctggcatggaaactgactaaccgcttgatccatgcgccaacgaaaagtcttcaacaggccgcccgtgacggggataacgaacgcctgaatattctgcgcgacagcctcgggctggagtaacagtacatcattttctttttttacagggtggaggaggaataatggaatatcaacactggttacgtgaagcaataagccaacttcaggcgagcgaaagcccgcggcgtgatgctgaaatcctgctggagcatgttaccggcagagggcgtacttttattctcgcctttggtgaaacgcagctgactgacgaacaatgtcagcaacttgatgcgctactgacacgtcgtcgcgatggtgaacccattgctcatttaaccggggtgcgagaattctggagcttgccgttatttgttagcccagcgaccttaattccgcgcccggatacggagtgtctggtggagcaggcactggcgcggttgcctgaacaaccttgccgtattctcgatctcgggacgggtaccggggcgattgcgcttgcgctggctagcgagcgcccggactgcgaaattatcgctgtagatcgtatgcctgatgctgtctccctggcacaacgtaatgcccagcatctggcgatcaaaaatatccacattctgcaaagcgactggtttagcgcgctagccgggcagcagtttgcgatgattgtcagcaatccgccgtatattgacgagcaggaccctcatcttcaacaaggcgatgtccgctttgagccgctcactgcgctggttgcggcagacagtggaatggcagacatcgtgcatatcatcgaacagagccgtaacgcgctggtatccggcggctttctgcttctggaacatggctggcagcagggcgaagcggtgcgacaagcatttatcctcgcggggtatcatgacgtcgaaacctgccgtgactatggtgataacgagcgcgtaacgctcggccgctattatcaatgacaagtttttctacactgcttagtgttcatcttattagtatcgcgctttctgttgggctattaaccttacgtttctggctacgttatcagaagcatccacaggcatttgctcgctggacgcgcattgtgccgccggttgtcgatacgctgttactgttaagcggcattgcgttgatggctaaagcgcacatcctgccattttccgggcaggcacagtggctgactgaaaagctgtttggagttatcatttatatcgttttgggttttattgcactcgattatcgtcgtatgcacagtcagcaggcgcgcattattgccttcccgctggcgttggtggtgctgtacatcatcattaaactcgccaccacaaaagtaccgttactggggtaagtcatgagaagcttagctgatttcgaatttaataaagcgccattgtgcgaaggcatgatcctggcttgcgaagcaatccgccgcgattttcccagccaagatgtttacgacgaactggagcgtctcgttagtctggcgaaggaagaaatcagccagcttctgcctttagaagagcagttggaaaaactgatcgcgctgttttacggcgactggggatttaaagccagtcgcggtgtttatcgtctttccgatgcattatggctggaccaggtgttaaagaatcgacagggcagtgcggtaagtttaggtgcggttttattatgggtcgcgaatcgtctcgatttgccgctgctgccggtgattttccctacgcagctgatattgcgcattgaatgtccggatggcgaaatttggctgattaatccttttaacggtgaaagcttaagcgaacatatgctggacgtatggttaaagggaaatatcagcccgagcgcggaactgttttatgaagaccttgatgaagctgataacattgaggtaatccgcaaattgctggatacactcaaagccagcttgatggaagaaaatcagatggagctggcgttacgcaccagcgaagctttattacaattcaaccctgaagatccctatgaaattcgcgatcgcgggttgatttatgcgcaactggattgcgaacacgttgcgttgaacgatttaagttatttcgttgaacagtgtccggaagacccgatcagcgaaatgatccgtgcgcaaataaataacatcgcgcataaacatattgtgctgcattaattaatcgacattttactcaagattaaggcgatcctatgaaacaaaaagtggttagcattggcgacatcaacgtagcaaatgacctgccgttcgtactgtttggcggtatgaacgtgttggaatctcgcgatctggcgatgcgcatttgcgagcactacgtaactgtgacccagaaactgggtatcccttacgtgttcaaagcctcttttgacaaagccaaccgctcctccatccactcttatcgtggaccgggcctggaagaagggatgaaaatcttccaggagttgaagcagacttttggcgtgaaaattatcaccgacgttcacgaaccaagtcaggcacagcccgttgctgatgtcgtggatgtgattcagttgccggcgtttcttgctcgccagactgacctggttgaagccatggcgaaaaccggtgcggtaattaacgtcaagaaaccacagtttgtcagcccgggacagatgggtaatatcgttgataaattcaaagaaggcggcaacgaaaaagtgattctttgcgatcgcggtgctaacttcggctatgacaacctggttgtcgatatgctgggcttcagcattatgaagaaagtgtctggtaacagcccggtgattttcgacgtgacccacgcactgcaatgccgcgatccgtttggcgcagcttccggtggtcgtcgtgctcaggtggctgagctggcacgagccggtatggcggtaggtctggcggggctgtttattgaagcgcatccggatccggaacatgcgaaatgtgatggtccatccgcgctgccgctggctaaactggaaccgttcctcaagcagatgaaagcgattgatgatctggtgaaaggtttcgaagaactggataccagcaagtaatcttttttgcttgaaaaataaagtattagcgttctgcgttaagacttttttcatgggtgccggatacaaaaaaggccgcaggctgttacccctgcggccggtttcgggcgcatattgccatcacggcagcctgacgcccgttttcaccttacttccggttacgccaccagctgacaatcgctgcggtaataattcccgccaggatcggtgctgccaggtcgtgccagaaaatcatggcaaactgcgcgagcgtcatatagccgccttgttgtaatgacaacattttgcggctattcttgaattgttctggttcaagattagcccccgttctgttgtcaggttgtacctctcaacgtgcgggggttttctctttccagcaaccaatgccaccagggataaagcccccgcaacattgcgcctcaccggataacgccggcttggtgtggatactacgactcaattcatcttcacttcatccctgaaatgtttgcaatgaagagtgcattccggtttttcaacagctgttacagtcatttcatgagtgctctggatgaggcttccagctcgggttgccaatatttacttgtggaagtgataaagacaaaaatggccgcaggctgttacccctgcggccggtttcgggcgcatattgccatcacggcagcctgacgcccgttttcaccttacttccggttacgccaccagccgacaatcgctgcggtaataattcccgccaggatcggtgccgccaggtcgtgccagaaagtcatggcaaactgcgcgagcgtcatatagccgccttgttgtaatgacaacattttgcggctattcttgaagtgtctggtttcaagattagcccccgttctgttgtcaggttttacctctcaacgtgcgggggttttctctttccagcaaccaatgccaccagggataaagcccccgcaacattgcgcctcaccggataattccggcttggtgtggatactacgtctcaattcatcttcacttcatccctgaaatgtttgcaataaagagtacattccggcttttcaacagctgttgcagtcgtttcatgagtgctctggatgatgcttccagctcgggttgccaatatttacttgtggaagagataaagacaaaaatggccgcaggctgttacccctgcggccggtttcgggcgcatattgccatcacggcagcctgacgcccgttttcaccttacttccggttacgccaccagctgacaatcgctgcggtaataattcccgccaggatcggtgctgccaggtcgtgccagaaaatcatggcaaactgcgcgagcgtcatatagccgccttgttgtaatgacaacattttgcggctattcttgaagtgtctggtttcaagattagcccccgttttgttgtcaggttttacctctcaacgtgcgggggttttctctttccagcaaccaatgccaccagggataaagccccgcaacattgcgcctcaccggataacgccggcttggtgtggatactacgtcgcaattcatcttcacttcatccctgaaatgtttgcaatgaagagtacattccggcttttcaacagctgttgcagtggtttcgtgcagggtgtggtacaggctcgcaattctgattaacgacctgtccaggtagtatgaagaaatacaataagcaggaatttatattatctcccccgattaccgtcatcggaggagatataactgtcaggcaaatatcgtcatcaaataggcggcaaacagtgccagatgcgctgcgccattgagcatgttagtacgtccggtggagaaggagatatggcacagcactaaagaggccaccatcaccaccatttctggcgcaccaagtgcaaactgcaattcgttacccgtcataaaggcaattagcgtgacgacaggtacggtaaggctaatggttgctaacacactaccaaagaacagattcatcgcgcgctgaacctggttgttcaacactgcttttaatgcacctaaaccttccgggctcagaatcaacagtgccaccaggaagccagtaaaggcgacaggggcattcatgctgtcgagcaatgtctccaggctgctggcgttcattttggtcaccgcaataacggcaatcagatggataatcaaccagatagcatgccacaggctgctatgggcagacggtttaccgtgatgcgggtcgtcatcatcactgtcatcttcgtgctcgtagacaaacaaactttgatgcgttttggtctggatcagcaaaaatacgccatacattgccgcagaaattaatgctaccagtaacgcctgaccggtactaaaattcgccgcaggcagagccattggaaataccagtacgattatcgccagggggaacagcgcaattaaatactgcttgataccaaacagattcatatattgggtggcaaacttacgaccgcccaacaataaactaaagccaaccagcccaccggtaacaatcataatgatactatagagcgtatcacgcattagcgttggcgcggcgtcgccggttgccattaaagcactaatcaaactgacttcaagaataaccacactaaggctaagaataaggctaccgtaaggttctcccaggcgatgggctaatacgtccgcatgacggacaacactaaaggcgctacttaaaataccaataagcgcaagaagattgatggcaatgaccactggtagtgtctggctgcttccccacaggaacagcactaccagcgccagaaccgggaaaataaggctagtctccttgtggcgggtttttaccgcctcttgagcattactcattatggttatccctttgcagatgaatttatcgaaaatgtaaaaaataggtaggaaaaataacagaaagtgtctggatatcggtaacattttacgaatttttaccccgctgtcgattttttactcattggggcataaaaataagtattacgtttagacaatgtttgttttagcgtctcttaagaagagtctgacctgaaaattcttatgttttggcaagagtagatattgttgaccacacttaatgttcaactttgtaaaaggagtcaacgatgccgtataaaacgaaaagcgatctgccggaaagcgtaaagcacgttctaccgtctcatgcccaggatatctataaagaagcgttcaacagcgcatgggatcaatataaagataaagaagatcggcgtgatgacgccagtcgcgaagaaaccgcgcataaagtggcctgggctgctgtgaagcatgaatatgccaaaggggatgatgataaatggcataaaaaaagctaaaaccggtcgcttagttaaagctattcgtgcggtgttgccttgcaagtggtccgtggattgcatattgtcccgttagtggtttcaaaatgagcagtaaaaatgtccggaagacaccaaaaagttgtcgcagggaagtatgcagtggcggaagtgtaaggtgataacgcgtgatttcttgatgaatgccgattgtaaaacggcatttggtgccattgaagaaagtctcttatggagtgcagaacaacgggcggctagcctggcggcgacgctggcttgtcgacctgatgagggaccggtgtggatcttcggctatggaagcttgatgtggaatccggcactggagtttaccgaaagctgcaccggtacactggttggatggcatcgcgcattttgcctgcgcctgaccgccgggcgcgggactgcgcaccagccgggacggatgcttgcactgaaagagggcggacgcaccacaggcgtcgcctatcgactgccagaagagacgctggagcaggaactaaccctgttgtggaagcgagagatgattaccggctgttatctgccaacctggtgtcagcttgatcttgatgatggacgcacagtaaacgccattgtgtttattatggacccgcgacatccagaatatgaatctgatactcgcgctcaggtcatcgcgccgttgattgcggcggcgagcggtccgctgggaaccaacgcacaatacctgtttagtctggaacaggagcttatcaaactgggaatgcaggacgatgggctgaatgatttgctggtaagcgtaaaaaaactgctggcggagaattttccggatggtgtgttacgtccgggattcgcctgagtaaacttcccgcatagtggggcgtcagacgccccctcaaacattaaaatgtgagcactttatcggcactcagcgtccattgcgccagttccacaagagtaccgatttccaccccatcaatcagaggaagtgtactaatcccgcgcccgtcggtacaggttttgcacaatttcaccggtacattctgagcggtaaggatctccagcatttgctgaatgttgtagccttcccctggtttttgcccgcgcaacccggctgtgaccgcatcagacatgaggaacagacgcagatccagattgctctcctgctctcgtaacgcaatggccagccgcaagctgttaaacaaggattcgctcccgtaaggtgcgccattggcaacgatcacgattttttgcattatttactcctgtattcagggaattagacactcatcttctatcttactgcttctgcagcgtctgaccaatcggtcacatttttaaggattttcctgaaagcgcgagaaaatacgacaaaagttgccagtaatcgttattctttaaggctatggtttttcattattaccggaagttaccgacgttttgagccgtttcgttcctcgcattatcccgttttatttactcttgcttgtagcaggcggtacagctaacgcacaatctaccttcgagcaaaaagcggcaaatccctttgataataacaatgatggtctgccggatttaggcatggctcccgaaaatcatgatggggaaaaacactttgctgaaattgtgaaagatttcggcgaaaccagtatgaatgataacgggctggatactggcgagcaggcaaaagctttcgcattgggaaaagtccgcgacgcgcttagtcaacaggttaatcagcacgtagagtcctggctaagtccgtggggaaatgccagtgttgacgtcaaagtggataacgaaggacatttcaccggcagtcgtggaagctggtttgtgccgttacaagataatgatcgttatctcacctggagccagcttggtcttactcagcaggataatgggttggtgagcaatgtgggcgttgggcaacgctgggcgcgcggcaactggctggtgggttataacactttttatgacaacttgctggacgaaaatcttcagcgagcgggctttggtgccgaagcgtggggcgaatatttgcgattaagcacaaacttttatcagccgtttgctgcatggcatgaacagacagccacgcaggaacaacggatggcgcgcgggtacgacctgacagctcggatgcgcatgccgttctatcaacacctcaataccagtgtcagcctagaacagtattttggtgatcgtgttgatttgtttaactctggtacgggttatcacaatcccgtcgcgttgagtctgggattaaattacacccctgtgccattagtcactgtgacggcccagcataaacagggtgaaagtggcgaaaatcaaaataacctcgggctgaatcttaattaccgctttggtgtaccgctcaaaaaacaactttctgcgggcgaggttgccgaaagtcagagcttacgtggtagtcgctatgacaatccgcagcgaaataatctaccgactcttgagtaccgacagcgaaaaacgttaacggtgtttctggcgacaccgccgtgggatctaaaacctggcgaaacagtgccgctgaaattacaaatccgcagtcgttacggtattcggcaactgatttggcagggcgatacgcagatattaagtttgacgccgggcgcacaagccaacagcgcggagggctggacgctgatcatgcctgactggcagaacggggaaggggcaagcaatcactggcgattgtctgtggtggtggaagataaccaggggcagcgtgtctcctccaatgagatcacgctaacgcttgtcgaaccgttcgatgcattgagtaacgacgaactgcgctgggaaccgtaatcagaaaatgcgctcctgatgcacccataccgctgcttccacgcgagacttgagcttcattttcttcagcatgtgcttgacgtgcacttttactgtgctttcggtgatatccaggcggcgggcaatcatcttgttcggcaaaccctgggcaatcagcttgagaatatcgcgctcgcgtggggttaactggttaacatcgcgctcagtagtggcacggttagcgcgcaagctggcggccagaacaggcgttaatgcttcgcttaataccatttcgccagcagctgcctgatgcaatgctttcagcagatcttccggttccatatcttttaacagatagccatccgcgccgcgtttcagtgcggtgaccacatcttcttcatggttagagacgctgaataccacaatgcgcccactgagggacttttcgcgcagtttatccagcgtttccagaccgttcatgccgggcatattgagatctaacaggatcagatcgggatcaagagactccgccagttcaataccctgttcgccattactcgcttcgccaaccacggtgatatctggtgccatactgataagctgttttacgccagttcgcagcatcgggtgatcgtcaatcagcaggatagtagccggttcctgattactcatgggtatctccttggacgtctgtgaaagttttttcgggaataaaggtgaccaccacttcggtgccaccactttcacgacggcggacgcggcaatcgcctcgtaaactttgcgcacgatcgcgcattattatcatgccgtagtgattgctgcggatggcattttcaggcacgccgcagccgttatcctggacggtcagtttgacctgattatcgttttgcgccaccgtcaccacgacttcactcgcttggctatgtttgagggcgttacttaatgcctcacgggcaatttgcaacaagtggattgcctgatggctaggcaccaggcgaggcggcaattgataatccagcttcaccgggaagccaaatttggcgctgtactcttcgcaactcgcctccagcgccggacgtaatccaggctcggtgagctgcaagcggaatgtggtgagcaattcacgcaactgcgcccaggatgcattcagttcgttacggatctgacttaacagttcgcggctgctttctggcagcgcatcgccctgcatctgtaaacaactcacctgcatcttcatgcaagagagagattgggcaatagaatcatgcagttcgcgcgcaatggtggcacgctcttccatcacgatcaactgttgctgacgttcctgatggcgatccagcgccagcgtggcggtgagttgttcaaccagggtatccaccagttgttgttgatcatggctaagatgacgcccctgcggcagggtcgccagcaaaataccgtactgcgtatgagagtcagccagccgccacttcagggtcgtgccgcgatcaccaacgggtaatacgccgcgcgggcagagctggcagcctttatcatcacaagtcatatctggctggcaggtaaactcctgatgattctcttcatcatcagtgtcatacacccgcaattcgatatcacgtagcagggttaaattctgtaagccgttgagtacaggactcaggcgttcacacagcggggcgcgggaatgcaaacggcggttagcctgccataaaaaagagaggatctgatttttatgctccagcccggcggttttctcctgaacccgctgctcaagtacggcataactttcggccagttctgcagacatattgttcaacgcagttccaagcatcgccatttcgttgcgcccgctgatgtttgcgcgttgggtaaaatcgcgatgactgacggcactcgccattgccagcagttgccgccacggttgtagcagtcgcgcccgcaaccagataatagtgaacaccagtaaaagtgccataaataccgccattacccgatggaccagtaccactgtctcgatgcgcatttccgtggtgcggtcaaaaccagataccagttgatcaagcccggcaacaaactggctgacatccgcactcaccgtttctcggttttgtgcacgcatcagcgcagggatcagttcattacgccagtaatcttgtaaaccctgtaattgcgccagttgtccgtctcgttctgctgctcgagtcaactcggcgctaaatgccgtttgttccatctctttaattaagggcttgtctttctcgcttaatggcactgccgccaacagacggtaactttgcatgcgcaggcttcccgctttgttgatcgcatgggcgctgccctgaacgccttgcaccagccagccagaaaccgccatccctgccagtccaatagcagtagaaagcaacacaataagcgcaacctgattaaccagggtgagcggagagagacaacgtttaagcatgtaaacctcttccttcaggctttaaatgagcaataaccttaatgaatgtgacgatacattctggaatggcagtattctcggctattggctgaagtatacccatacccggaaagagttactccttatttgccgtgtggttagtcgctttacatcggtaagggtagggattttacagcaccgtgaaaaatctcataatttttatgaagtcactgtactcactatgggtaatgataaatatcaatgatagataaagttatcttatcgtttgatttacatcaaattgcctttagctacagacactaaggtggcagacatcgaaacgagtatcagaggtgtctatgagtcacagttccgcccccgaaagggctactggagctgtcattacagattggcgaccggaagatcctgcgttctggcaacaacgcggtcaacgtattgccagccgcaacctgtggatttccgttccctgtctgctgctggcgttttgcgtatggatgttgttcagcgctgttgcggtgaacctaccgaaagtcggctttaattttacgaccgatcagctatttatgttgactgcgctgcctagcgtttctggcgcgttattacgtgttccatactcctttatggttcctatcttcggtggtcgtcgctggacggcgttcagcaccggtattctgattattccttgcgtctggctgggttttgccgtgcaggatacctccacgccttatagcgtcttcatcatcatctctctgctatgcggctttgctggcgcgaacttcgcatccagtatggcaaacatcagcttcttctttccgaaacagaagcagggtggcgcgctgggtctgaatggtggtctgggaaacatgggcgtcagcgtcatgcagttggttgctccgctggtggtaagtctgagcattttcgcagtatttggtagccagggcgtcaaacagccggatgggactgagctgtatctggcgaatgcgtcctggatatgggtgccgttccttgccatcttcaccattgcggcgtggtttggcatgaacgatcttgctaccagcaaagcctccatcaaggagcagttgccggtactcaaacggggtcatctgtggattatgagcctgctgtatctggcaaccttcggctccttcatcggcttctccgcgggctttgcaatgctgagtaaaacgcagttcccggatgttcagattctgcaatacgctttcttcgggccgtttattggtgcgctggcgcgttctgcaggtggtgcattatctgaccgtctgggcggaactcgtgtcacgctggtgaactttattctgatggcgattttcagcggcctgctgttcctgaccttaccgactgacgggcagggcggaagcttcatggcgttcttcgcggtcttcctggcgctgttcctgacagctgggctgggtagtggttccactttccagatgattagtgtgatcttccgtaaactgacaatggatcgcgtgaaagcagaagggggttctgacgaacgtgcgatgcgtgaagcggcaaccgacacggcggcggcgctgggtttcatctctgcgattggcgcgattggtggcttctttatcccgaaagcgtttggtagcagcctggcattaacgggtagcccagtcggcgcaatgaaggtatttttgattttctatatcgcctgcgtagtgattacctgggcggtatatggtcggcattctaaaaaataaaccgttactcgtcatacttcgggttacatgtgctgcggctgcgttcattcaccccagtcacttactttagtaagctcctgggattcattcacttgccgccttcctgtaaaccgaattatatagagtaaaatatttgattatcctttgcgcggcatgatgtcgcgctttttttatgcgtcatttagttacaacatactaatgttatatggtttatttcgccggatttcattaagagccattaatatgttacccatggggaatactccttaatacccatctgcataaaaatcttaatagtttaaataactacaggtataaaacgtcttaatttacagtctgttatgtggtggctgttaattatcctaaaggggtatcttaggaatttactttatttttcatccccatcactcttgatcgttatcaattcccacgctgtttcagagcgttaccttgcccttaaacattagcaatgtcgatttatcagagggccgacaggctcccacaggagaaaaccgatgagtaaattcctggaccggtttcgctacttcaaacagaagggtgaaacctttgccgatgggcatggccagcttctcaataccaaccgtgactgggaggatggatatcgccagcgttggcagcatgacaaaatcgtccgctctacccacggggtaaactgcaccggctcctgcagctggaaaatctacgtcaaaaacggtctggtcacctgggaaacccagcagactgactatccgcgtacccgtccggatctgccaaaccatgaacctcgcggctgcccgcgcggtgccagctactcctggtatctttacagtgccaaccgcctgaaatacccgatgatgcgcaaacgcctgatgaaaatgtggcgtgaagcgaaggcgctgcatagcgatccggttgaggcatgggcttctatcattgaagacgccgataaagcgaaaagctttaagcaggcgcgtggacgcggtggatttgttcgttcttcctggcaggaggtgaacgaactgatcgccgcatctaacgtttacaccatcaaaaactacggcccggaccgtgttgctggtttcagcccaattccggcaatgagcatggtttcttacgcaagcggtgcacgctatctcagcctgattggcggtacttgcttaagcttctacgactggtactgcgacttgcctcctgcgtctccgcaaacctggggcgagcaaactgacgtaccggaatctgctgactggtacaactccagctacatcatcgcctgggggagtaacgtgccgcagacgcgtaccccggatgctcacttctttactgaagtgcgttacaaagggaccaaaactgttgccgtcacaccagactacgctgaaatcgccaaactgtgcgatctgtggctggcaccgaaacagggcaccgatgcggcaatggcgctggcgatgggccacgtaatgctgcgtgaattccacctcgacaacccaagccagtatttcaccgactatgtgcgtcgctacaccgacatgccgatgctggtgatgctggaagaacgcgacggttactacgctgcaggtcgtatgctgcgcgctgctgatctggttgatgcgctgggccaggaaaacaatccggaatggaaaactgtcgcctttaataccaatggcgaaatggttgcgccgaacggttctattggcttccgctggggcgagaagggcaaatggaatcttgagcagcgcgacggcaaaactggcgaagaaaccgagctgcaactgagcctgctgggtagccaggatgagatcgctgaggtaggcttcccgtactttggtggcgacggcacggaacacttcaacaaagtggaactggaaaacgtgctgctgcacaaactgccggtgaaacgcctgcaactggctgatggcagcaccgccctggtgaccaccgtttatgatctgacgctggcaaactacggtctggaacgtggcctgaacgacgttaactgtgcaaccagctatgacgatgtgaaagcttataccccggcctgggccgagcagattaccggcgtttctcgcagccagattattcgcatcgcccgtgaatttgccgataacgctgataaaacgcacggtcgtagcatgattatcgtcggtgcggggctgaaccactggtatcacctcgatatgaactatcgtggtctgatcaacatgctgattttctgcggctgtgtcggtcagagcgggggcggctgggcgcactatgtaggtcaggaaaaactgcgtccgcaaaccggctggcagccgctggcgtttgcccttgactggcagcgtccggcgcgtcacatgaacagcacttcttatttctataaccactccagccagtggcgttatgaaaccgtcacggcggaagagttgctgagtccgatggcggacaaatcccgctataccggacacttgatcgactttaacgtccgtgcggaacgcatgggctggctgccgtctgcaccgcagttaggcactaacccgctgactatcgctggcgaagcggaaaaagccgggatgaatccggtggactatacggtgaaatccctgaaagagggttccatccgttttgcggcagaacaaccagaaaacggtaaaaaccacccgcgcaacctgttcatctggcgttctaacctgctcggttcttccggtaaaggtcatgagtttatgctcaagtacctgctggggacggagcacggtatccagggtaaagatctggggcaacagggcggcgtgaagccggaagaagtggactggcaggacaatggtctggaaggcaagctggatctggtggttacgctggacttccgtctgagcagcacctgtctctattccgacatcattttgccgacggcgacctggtacgaaaaagacgacatgaatactagcgatatgcatccgtttattcacccgctgtctgcggcggtcgatccggcctgggaagcgaaaagcgactgggaaatctacaaagccatcgcgaagaaattctccgaagtgtgcgtcggccatctgggtaaagaaaccgacatcgtcacgctgcctatccagcatgactctgccgctgaactggcgcagccgctggatgtgaaagactggaaaaaaggcgagtgcgacctgatcccaggtaaaaccgcgccacacattatggtcgtagagcgcgattatccggcgacttacgaacgctttacctctatcggcccgctgatggagaaaatcggtaatggcggtaaagggattgcctggaacacccagagcgagatggatctgctgcgtaagctcaactacaccaaagcggaaggtccggcgaaaggccagccgatgctgaacaccgcaattgatgcggcagagatgatcctgacactggcaccggaaaccaacggtcaggtagccgtgaaagcctgggctgccctgagcgaatttaccggtcgtgaccatacgcatctggcgctgaataaagaagacgagaagatccgcttccgcgatattcaggcacagccgcgcaaaattatctccagcccgacctggtctggtctggaagatgaacacgtttcttacaacgccggttacaccaacgttcacgagctgatcccatggcgtacgctctctggtcgtcagcaactgtatcaggatcaccagtggatgcgtgatttcggtgaaagcctgctggtttatcgtccgccgatcgacacccgtagcgtgaaagaagtgataggccagaaatccaacggcaaccaggaaaaagcgctcaacttcctgacgccgcaccagaagtggggtatccactccacctacagcgacaacctgctgatgctgactttaggtcgcggtggtccggtggtctggttgagtgaagccgatgccaaagatctgggtatcgccgataacgactggattgaagtcttcaacagcaacggtgctctgactgcccgtgcggttgtcagccagcgtgttccggcagggatgaccatgatgtaccacgcgcaggaacgtatcgttaacctgcctggtagcgaaattacccaacagcgtggtggtatccataacagcgtcacccgtatcacgccgaaaccgacgcatatgatcggcggctatgcccatctggcatacggctttaactactatggcaccgtaggttctaaccgcgatgagtttgttgtagtgcgtaagatgaagaacattgactggttagatggcgaaggcaatgaccaggtacaggagagcgtaaaatgaaaattcgtagtcaagtcggcatggtgctgaatctcgataagtgcatcggctgccacacctgtagtgttacctgtaaaaacgtctggaccagccgtgaaggcgtggaatatgcgtggttcaacaacgtggaaaccaagccgggccagggcttcccgactgactgggaaaaccaggaaaaatacaaaggcggctggatccgtaaaatcaacggcaaactgcagccgcgcatgggtaaccgtgccatgctgctgggtaaaatcttcgctaacccgcatctgccggggatcgacgattattacgagccgttcgattttgactatcagaacctgcataccgcgccggaaggcagcaaaagccagccgattgcccgtccgcgtagcctgattaccggggaacggatggcgaaaatcgaaaaagggccgaactgggaagatgacctgggcggtgagtttgacaaactggcgaaagacaagaacttcgacaacatccagaaggcgatgtatagccagttcgaaaacaccttcatgatgtatttgccgcgcctgtgcgaacactgcctgaacccggcatgtgtggcgacctgcccgagcggtgcgatttacaagcgtgaagaagatggcatcgtcctgatcgaccaggataaatgccgtggctggcgtatgtgcatcactggatgcccgtacaaaaaaatctacttcaactggaagagcggtaagtctgagaagtgcatcttctgctatccgcgtattgaagcgggtcagccgaccgtgtgcagtgaaacctgtgtcggtcgtatccgttatcttggcgtgctgttgtacgatgccgacgctattgaacgtgcagccagcaccgagaacgagaaagatctttaccagcgtcagctggacgtgttcctcgatccgaacgatccgaaagtcatcgagcaggcgattaaagacggtattccgctgagcgttattgaagccgcacagcagagcccggtttataaaatggcaatggaatggaaactggcgctgccgctgcatccggaatatcgcacactgccgatggtctggtacgtgccgcctctgtctccgattcagtctgcagcagacgcgggtgagctgggtagcaacggcattctgccagacgtcgaaagcctgcgtattccggtacagtatctggcgaatctgctgaccgccggtgataccaaaccggtactgcgcgcactgaaacgtatgctggcgatgcgtcattacaaacgtgctgaaaccgttgacggtaaagttgatacccgtgcgctggaagaggtcggtctgaccgaagcccaggcacaggagatgtaccgttatctggcgattgctaactacgaagatcgctttgtggtgccgagtagtcatcgtgaactggcacgggaagccttcccggagaaaaatggctgcggctttacctttggtgatggctgccacggtagtgataccaaattcaatctgttcaacagccgtcgtatcgatgccatcgatgtgaccagcaaaacggagccgcatccatgatcgaactcgtgattgtaagccgtctccttgaatatccggatgctgccttatggcagcatcaacaagagatgtttgaggcgattgccgcgagcaaaaatctgccaaaagaggatgcccatgcgctgggcattttcctgcgcgatttaacgacgatggatccgctcgatgcccaggcgcagtacagcgaactgttcgaccgtggccgcgccacgagtctgttgctgtttgaacatgtgcacggcgaatcccgcgaccgcggccaggcgatggtggacctgctggcgcagtacgagcagcacggcttgcagttaaacagccgcgaattgccggaccatctgccgctgtatctggagtacctggcgcagctgccgcaaagcgaagccgtggaaggtttgaaagatatcgcgccgattctggcattgctgagcgcgcgtctgcaacagcgtgaaagccgttatgccgtgctgtttgatctgctgctgaaactggcgaataccgctatcgacagcgacaaagtggcggaaaaaattgccgacgaagcgcgcgatgatacgccgcaggcgctggatgctgtctgggaagaagagcaggttaaattctttgctgacaaaggctgcggtgatagtgcaatcactgcgcatcagcgtcgctttgccggtgccgtcgcgccgcaatatctgaatatcaccaccggaggacagcactaatgcaattcctgaatatgttcttctttgatatctacccgtacatagccggggcggtcttcctgattggtagctggctgcgttatgactacgggcagtacacctggcgcgcggcgtccagccagatgctggatcgcaaagggatgaacctggcgagcaacctgttccatatcgggattctggggatttttgtcggtcacttcttcggtatgctgacgccgcactggatgtatgaagcctggctgccgattgaagtgaaacagaaaatggcaatgtttgctggtggtgccagcggcgtgctgtgtctgattggcggcgtgctgttgctgaaacgtcgtctgttcagcccacgcgtgcgtgcaaccactaccggagcggatatcctgatcctgagcctgctcgttatccagtgcgcgctgggcctgttgaccattccgttctccgctcagcatatggacggtagcgagatgatgaaactggttggctgggcgcagagcgtggtgaccttccacggtggcgcttctcaacacctcgatggtgtggcgtttatcttccgtctgcacctggtgctggggatgacgttattcctgctgttcccgttcagccgtctgatacacatctggagcgtaccggtggagtatctgacacgtaagtaccagctggtgcgcgctcgtcactaagcgaattttagttcacatagaccctgcttcggcggggtttttttatgggcacggtgcggggtgagttgtcggatgcgcttcgcttatccgacctacaggggaggatattgtaggcccggtaaacgtggtgccatcgggcaaaattagctcggagtaacaggttttgattatttaaggaagcgatggtggtgggggaaggattactcagcgctgcgcgcttcgcccttcgggtcgttgcctgcggcaacgctctcagcctggcgctcaagagcaaccttggtcgaagcttcagttccttccccgcttgggcagaatatttgattgcggatagctttgagaattccggggcttttgaaagtgatggtggtgggggaaggattactcagcgctgcgcgcttcgccctagcggtcgttgcctgcggcaacgctctctcgctgacgctcgagccgaaccttaatcgaagcttctcatccttccccgcatgggcagaatatttgattgcggattcgcttgagagttcagggacttttgaaagtgatggtggtgggggaaggattactcagcgctgcgcgcttcgcccttcgggtcgttgcctgcggcaacgctctctcgctggcgctcgagtgctaccttggtcgaagcttctcatccttccccgcatgggcagaatatttaattgcggattcgttgggaagttcagggacttttgaaagtgatggtggtgggggaaggattcgaaccttcgaagtcgatgacggcagatttacagtctgctccctttggccgctcgggaaccccaccaggggtaattcaaattttgaggtaatgcttgagatggtggtgggggaaggattattcgtcgcttcgctcctcacccttcgggccgttgcctgtggcaacgttctctcgctttcgctcgaatcgaaccttagtcgaaggttctcacccttccccgatgagtgcaaactttcacaatctcaccgaagttaccacatcgctgtggtgaattatggtggtgggggaaggattcgaaccttcgaagtcgatgacggcagatttacagtctgctccctttggccgctcgggaaccccaccacggggtaatgctttttactggcctgctcccttatcgggaagcggggcgcatcatatcaaatgacgcgccgctgtaaagtgttacgttgagaaaaatgaactggttgcgtaattttcatccgtaacggattaaaggtaaccagttatttttgctggcgattaaagaataatcgttcgattaccgtaaacaaagacgcgctgtgccagtactttgtatagtgcacgacttaagacgtttttctcgacgtcacgacctgcgcgcatcatatcttcagctgtgtaggtatgatcgacatgaataacgtcctgcatgatgattgggccttcgtccagattgtcattcacatagtgagcggttgcgccaataatcttcacaccacgttcataggcctggtgataaggacgtgcgccaataaacgctggcaggaaactatggtgaatattgatgatcttattcgggaagcgtgccacaaattccggcgttaatacccgcatatacttcgccagcaccacgtagtcaggttgataagcatcaatggcatccgccatcttttgatcgtgctcgttgcgggttaacccttcatggcttaccagctcaaacggaatatcaaaacgctcaaccagagaacgtaaagtatcgtggttaccaataactgccgcgatttcgacatccaggccgccgtaattggctttcatcaacaaatcgccaaggcaatgcgcttctttagtgaccagaatcactatccggcgacgaccggcaggattcagctcacgcacggagccttctggcaatgcgctatcgagatccgccagcagggtggaatcattaaaaatcccttccagttccgtgcgcataaaaaagcgcccggtacggtgatcaacaaattcattgttctgtacgatatttaactcgtgcttgtagcaaatattggtaatacgtgcgatcagacctttttggtccggacaaatagtacgcagaactttacgttggagactatgcattgctggaaaaaccttgttgagagtgtttgctaaaccgtaccgtcaaccattattggccgcagcactttttaaattttttaccactaccacaagggcagggatcgttgcgaccaaactgcggacgtgtaccgtcaatatagtaccattgaccgttttctttcaaaaatcggctacgttcaattattgcacctgttttaccaccttcggtaaatcgagcaacaaaactgacaaatccgatattgtcggcgtcctgccaacaatgttcaaatacggtcaatcccaaccattcagtatgcgcaaatccggccatcaattcggcacgtaacgccgctgctccacaagagggatgccaggtctttattaaataatctgcgtcttgcatcacaaaagcgcagtaacggctacgcatgagatgttctggatcaggtgcaaccttttcaccagacacataagggtggcaacataggctatactcgacagcactaccacagggacaaagctgagacacaaataatctccctggaaacaataacggcgtattaaccgcctgagtagcactatgttaaccgagcagtagcgatgtggctacgattgcattccaggggaatcttgcgggaataatgagaaagataaaaatagggctggcgctgggatctggcgcggcgagaggttggagccatattggcgttattaatgcgctaaaaaaagtgggtattgaaattgatatcgttgcaggatgtagtattggtagcctggtgggcgctgcctatgcatgcgatcgattatctgcgctggaagattgggtgacctctttcagttattgggatgttttacgcctgatggatctctcctggcagcgcggtgggttactgcgcggcgagcgtgtcttcaatcaataccgcgaaataatgccggaaacagagatcgaaaattgttcccgtcgctttgcggctgttgccaccaatttaagtacgggacgtgaattatggtttactgaaggcgatctccatcttgctattcgcgcaagttgcagtattccaggactcatggcacctgttgcacataacggctactggctggttgatggagcagtcgttaacccaattcctatttccctcacgcgtgcattgggggctgatattgtgatagcggttgacctgcagcacgatgctcatttgatgcaacaagatttgctctcctttaatgtcagtgaagaaaatagcgagaatggtgattctctgccgtggcatgcgcgtctgaaagaaaggttaggcagcataacgacacgtcgggcggtgacagcgccaacggcaacagagattatgaccacttctatccaggtgctggagaaccgccttaaaaggaaccgcatggcaggtgatccgcccgatattctgattcaacctgtttgcccgcaaatatctacgcttgatttccatcgcgcgcacgctgccattgcggccggacagctggcagtggaaaggaaaatggacgaacttttgccgttggtacgcaccaacatttgaccagaatttttatctacacttaagttaattctgacaggcgcaggtggcaatagcatgccactattgagtaaagccagtcaggggagagaacatgacgcagccattggtcggaaaacagattctcattgttgaagatgagcaggtatttcgcagccttctggatagttggttttccagtttgggagcgacaacggtactggcggctgatggggtggatgcccttgagttgctgggaggtttcactccagacctgatgatatgtgatatcgcgatgccacgaatgaacgggcttaaactgctggagcatatacgtaacagaggcgaccagaccccagttctggtgatatctgccactgaaaatatggcagatattgccaaagcgttacgtctgggcgttgaagatgttttgctgaaaccagttaaagatctgaatcgcttgcgcgagatggtttttgcctgtctctatcccagcatgtttaatagccgcgttgaggaagaggaaaggctttttcgcgactgggatgcaatggttgataaccctgccgcagcggcgaaattattacaggaactacaaccgccggttcagcaggtgatttcccattgccgggttaattatcgtcaattggttgccgcggacaaacccggcctggtgcttgatattgccgcacttagcgaaaacgatctggcattttattgccttgatgtcacccgagctggacataatggcgtacttgctgccttgttattacgcgcattgtttaacggattattacaggaacagcttgcacaccaaaatcaacggttgccagagttgggcgcgttattgaagcaggtaaaccatttacttcgtcaggccaatctgccggggcagtttccgctattagttggctattatcatcgcgaactgaaaaatctcattctggtttctgcgggtctgaatgcgacgttaaataccggcgaacaccaggtgcaaatcagtaatggtgttccgttaggcactttaggtaacgcttatttgaatcaattgagccagcgatgcgatgcctggcaatgccaaatatggggaaccggtggtcgactgcgcttgatgttgtctgcagaatgagcaaacgataacgcgggctaaatttgcattacctgctaatgtcggctggtggtactatcgtcgccattcgtataagtaattgtcttaattatgctaactcgcctccttttcagaacttagccccttcggggtgctgatatactgggatgcgatacagaaatatgaacacgttcaaaacacgaacagtccaggagaatttaaatggctgccattaatacgaaagtcaaaaaagccgttatccccgttgcgggattaggaaccaggatgttgccggcgacgaaagccatcccgaaagagatgctgccacttgtcgataagccattaattcaatacgtcgtgaatgaatgtattgcggctggcattactgaaattgtgctggttacacacagttctaaaaactctattgaaaaccactttgataccagttttgaactggaagcaatgctggaaaaacgtgtaaaacgtcaactgcttgatgaagtgcagtctatttgtccaccgcacgtgactattatgcaagttcgtcagggtctggcgaaaggcctgggacacgcggtattgtgtgctcacccggtagtgggtgatgaaccggtagctgttattttgcctgatgttattctggatgaatatgaatccgatttgagtcaggataacctggcagagatgatccgccgctttgatgaaacgggtcatagccagatcatggttgaaccggttgctgatgtgaccgcatatggcgttgtggattgcaaaggcgttgaattagcgccgggtgaaagcgtaccgatggttggtgtggtagaaaaaccgaaagcggatgttgcgccgtctaatctcgctattgtgggtcgttacgtacttagcgcggatatttggccgttgctggcaaaaacccctccgggagctggtgatgaaattcagctcaccgacgcaattgatatgctgatcgaaaaagaaacggtggaagcctatcatatgaaagggaagagccatgactgcggtaataaattaggttacatgcaggccttcgttgaatacggtattcgtcataacacccttggcacggaatttaaagcctggcttgaagaagagatgggcattaagaagtaacatccgtatcggtgttatccacgaaacggcgttgagcaatcgacgccgtttttttatagcttattcttattaaattgtcttaaaccggacaataaaaaatcccgccgctggcgggattttaagcaagtgcaatctacaaaagattattgcttgatcaggaaatcgtcgagggatttaccttgctcatccattgcttttttgattacagctggagtacggccttggccagtccaggttttagtttcgccgttttcgtcaacgtagctatattttgccggacgctgagcacgtttagctttggtgccagatttaacggcagcaaggctattcagcagttcgttcgggtcaataccgtcagcgatcagcatttcgcgatattgctgcagtttacgagtgcgctcttcaacttcagcagcagccgcgctttcttcttcgcgacgttcgttaacaacaacttctaatttttccagcatttcttccagcgtttcaagtgtacattctcttgcctgcgcacgaagagtacggatgttgttcagaattttaagtgcttcgctcattgtagtaatctcaaacttatattggggtggtttgttgaggtaataatagagccttaaattcagttgtgcaatagccaggaatgtaaggaattcaaaattgttctttattttgtgccgccaataaatatcttttcataaaattagccagaaaagacgcggcatatagccctatttacaccgatgatttcgcagcacgtgaggttaaaacttcctgattcatgtcacattttatggggagattatcgtaggctgacgacctttcagtcttctgtattagttgtgtttacgagaattccctattaagcgaatgatgaaaagtagaacagtcgcaataagagcatggacttagtattgcactatctcctggaggtcaacagagggctattacttgcgcaacaggttaaagattgtgaatagttaccagcagtcatttacccgcttataacaagcgaggcagttgtaatgatagctcagaaggattatgcaaggcttcgtaagggagaacgcatatacccacttctgtgcatactgttgagctgaaaaactgacgaattatgataaactccagccaactttatttcatatcattgagggcctgtggctgatggcacagctatatttctactattccgcaatgaatgcgggtaagtctacagcattgttgcaatctagttacaattaccaggaacgcggcatgcgcactgtcgtatatacggcagaaattgatgatcgctttggtgccgggaaagtcagtagccgtataggtttgagtagccctgcaaaattatttaaccaaaatagtagtttatttgatgagattcgtgcggaacatgaacagcaggcaattcattgcgtactggttgatgaatgccagtttttaaccagacaacaagtatatgaattaagcgaggttgtcgatcaactcgatatacccgtactttgttatggtttacgtaccgattttcgaggtgaattatttattggcagccaatacttactggcatggtccgacaaactggttgaattaaaaaccatctgtttttgtggccgtaaagcaagcatggtgctgcgtcttgatcaagcaggcagaccttataacgaaggtgagcaggtggtaattggtggtaatgaacgatacgtttctgtatgccgtaaacactataaagaggcgttacaagtcgacagtttaacggctattcaggaaaggcatcgccacgattaataagaatttctttactgacagggtgagcagggcacttttatcctgtcagttcgttttacgcacttcttccgggctatatacccttctcggcagttttttaacgccgctatacgcctcacagggctcttaagcaccgacgttgacttgtgacctgtaaagtacaatatccctgtgtttaggcgttatacatcgtcgcaaatatgatgaaggctaatgctgtcggtttatggaaaagttgctttgggtaaacaaaaaatacggccccagaagggcaatgccgttcacttaagaggagcggcactatgtttcacaggataacgggtttttgatatcttaaccgacctcggccttgatggtcgggggcgttttgttatgaacaccacttccagagcaccccgaagatgctccagtcgtttcgggatggtccctggtgacgccgtgtttcccagctctatcatttctgatgcgatattcttccacgcaggcagtagccagtggcggttacaacccttctggttcagcgtcagcagcaggtcttcgctgtaaaaaagtttatcaaacaacgtaatagagttatccgggatggtggcgagcatggagtgggccagcacagtttcgctctgccggtaaggtgcggtcacggcattcagcagaatgtgacttcccaggttcattaaggccaccagacgcataaccgggtaggcgttctgccgcttagtggatgtgttggcagacccataatattcacgcagctcgggtttatcaggtgtcctgaactgtgcgccatcaatggcaaaaagttgcaggccgtgccagtcatccttcaggtaacgttccgcgcccctgtctgtgcggtctggcggaagagccattccactggggcggcccccacgcgctgacgcgcctgggtgacagcgctgcgggccagcaggttcatccccgcttcgccatccgcgctcaggttcagacggcgaacaacatcggtaattggctcattgcaccaccatccagataaccatgtcccccggtaaacgacggcggcgaacggtcgcatgagcagaaagcgtcaggcagtgttgtatccactcggtgggaaggtgttctgcaaatagttgtgcagagggcggaggcataagcggatggtcactgaaatcgagcagatcattgagaagtggcataagaaaacggctccctgttgtggaagccgttatagtgcctcagtttaaggatcggtcaactaatccttaactgatcggcattgcccagaaggggccgtttatgttgccagacagcgctactgattaagcggattttttcgcttttttctcagctttagccggagcagcttctttcttcgctgcagtttcaccttctacataatcacgaccgtagtaggtatccagcagaatctgtttcagctcggagatcagcgggtaacgcgggttagcgccggtgcactggtcatcgaatgcatcttcagacagtttatccacgttcgccaggaagtctgcttcctgaacgccagcttcacggatagatttcggaatacccagttcagctttcagcgtttccagccatgccagcagtttctcgatcttagcagcagtacggtcgcccggtgcgctcagacccaagtggtcggcaatttcagcataacgacggcgagcctgcggacggtcatactggctgaatgcagtctgcttggtcgggttgtcgttcgcattgtagcgaataacgttacaaatcagcagggcgtttgccagaccgtgcggaatatggaactgggaacccagtttgtgcgccatactgtgacatacacccaggaaggcgttcgcaaacgcgatacccgcgatagtcgctgcactgtgaacacgttcacgcgctaccggatttttagacccttcgtggtaggacgctggcagatattctttcagcagtttcagtgcctgcagagcctgaccatcagagaactcagatgccagtacagaaacataagcttccatggcgtgagttactgcgtccagaccaccgaaagcacacagggacttcggcatgtccataaccaggttggcgtcgacaatcgccatatccggagtcagcgcatagtctgccagcggatatttctgaccagtagcgtcgtcagttacaaccgcaaacggagtgacttcagaacctgtaccagaagtggtggtgacagcgatcattttcgctttcacgcccattttcgggaacttgtagatacgtttacggatatccataaagcgcagcgccagctcttcgaagtgagtttccggatgttcgtacataacccacatgatcttcgcggcgtccatcggggaaccaccacccagcgcgataatcacgtctggtttgaaggagtttgccagttctgcacctttacgaacgatgctcagggtcgggtccgcttctacttcgaagaagacttcagtttcaacgcctgctgctttcagtacggaagtgatctgatcagcataaccattgttgaacaggaagcggtcagtcacgatgagcgcacgtttgtggccatcagtaatcacttcatccagcgcgattggcagggagccacggcggaagtagatagatttcggaagtttgtgccacaacatgttttcagctcgcttagcaacggttttcttgttgatcaggtgtttcggaccaacgttttcagagatggagttaccaccccaagaaccacaacccagagtcagggaaggtgcgagtttgaagttatacaggtcaccgataccaccctgagacgctggggtgttaatcaggatacgcgccgttttcattttctgaccgaagtaagaaacgcgagccggttggttatcctggtcagtgtacaggcaagaggtatgaccgataccgcccatagcaaccagtttctctgctttttctaccgcgtcttcgaaatctttagcgcggtacattgccagagtcggggacagtttttcatgtgcgaacggttcgctttcatcaacaacggtcacttcaccgatcagaatcttggtgttttctggtacagagaagcctgccagttcagcaattttataggctggctgaccaacgatagccgcgttcagcgcaccgtttttcaggataacatcctgaacagctttcagctctttaccctgcaacagatagccgccgtgggttgcaaaacgttcacgtacagcgtcataaacagagtcaacaacaacaacagactgttcagaagcacagattacgccgttgtcgaaggttttggacatcagtacagatgcaactgcacgtttgatatcagcagtttcatcgataacaactggagtgttgcccgcgcctacaccgatagctggtttaccggagctgtatgcggctttaaccatgcccggaccaccagtcgcgaggatcaggttgatgtctgggtggtgcatcagtgcgttagacagttcaacagaaggttgatcgatccagccgatcagatctttcggagcaccggcagcgatagcagcctgcagaacgatatcagccgctttgttggtggcatcttttgcacgcgggtgcggggagaagataatggcgttacgggtcttcagactgatcaggcttttgaagatagcagtactagtcgggttagtggtcggaacgataccgcaaataataccgattggttcagcgatagtgatggtaccaaaagtgtcgtcttcagacagaacaccacaggttttttcatctttataggcgttgtagatatattcagaagcaaagtggtttttgatcactttatcttcgacgatacccatgccggattcggcaacggccattttcgcgagtgggattcgagcatctgcagcagccagagcggcggcgcggaagattttgtctacttgctcttgagtgaaactggcatattcacgctgggctttttttacacgctctacgagtgcgttaagttcagcgacattagtaacagccataatgctctcctgataatgttaaacttttttagtaaatcatctgctcgaatacgagagtatagtcagtgcggtgatgatttgcttaacctatgaaaatcaaaagcttactcgcgctcacactcactgtgatttactaaaagagtttaaacattagagttattatctctaatgcgtcacttccaggtggcgtaagcaagattactcacttctgggtactgattacgtgatccaaatcaaatttttgcaaagctgacacctttcagcatcgcttttcgccattatagctaacagttaataaattgtagtatgatttggtggctacattagcatgttttgcacaactagataacaataacgaatgatagcaattttaagtagttaggaggtgaaaaatgctgtcaaaaggcgtattgtcagcgcgtcttttcaaccttatttatggctaacattatccggcttttgcttcggagctaaccgtgattcagaccttttttgattttcccgtttacttcaaatttttcatcgggttatttgcgctggtcaacccggtagggattattcccgtctttatcagcatgaccagttatcagacagcggcagcgcgaaacaaaactaaccttacagccaacctgtctgtggccattatcttgtggatcagcctttttctcggcgacacgattctacaactttttggtataagtattgatagcttccgtatcgccgggggtatcctggtggtgacaatagcgatgagcatgatcagcggcaagcttggcgaggataaacagaacaagcaagaaaaaagtgaaaccgcggtacgtgaaagcattggtgtggtgccactggcgttgccgttgatggcggggccaggggcgatcagttctaccatcgtctggggtacgcgttatcacagcattagctatctgtttggtttctttgtggctattgcattgttcgctttatgttgttggggattgttccgcatggcaccgtggctggtacgggttttacgccagaccggcatcaacgtgattacgcgtattatggggctattgctgatggcattggggattgaatttatcgttactggtattaaggggattttccccggcctgcttaattaattcctttcaaatgaaacggagctgccatgctccgtttacttcgtcattatttttactttgttcccgcgcagttatcaaaagcaaaaggaataggtaaaaatattcttctcaaattacagttagttataaggatttccttaactgcttctcctcaccatcatgttattttcgccacatcataatcctgggcttgctgaagaataattgaaatgatattattaattccactgcctttggtagaggaaagtgctaaataataatcaattgttaaattattgtgcatttcactactggaactgtaatcagaaaagatagacatgcttagccaatctctatttgattgaattgaaagatgtttgttaaggcatggatgcaagctatagattctgatacggtcaataaaagagaattgcttaacaattttgcaaaatgtattggcgagtaagaaccgcatttggtactttccgggcaaccgccagacgattctttattggtaatgagaataattaacaattaaagagcgtcgcgaaagaataatgtgtctcgacaggggagacacagtacgaatcgacataaggtgatcgtctgaatcaccagaataaataaagtcggtgatagtaatacgtaacgataaagtaacctgacagcagaaagtctccgagcctgtgcagggtcccaatccgggattacacatgctggttaataccagtaattataatgagggagtccaaaaaacaatgaccaacatcaccaagagaagtttagtagcagctggcgttctggctgcgctaatggcagggaatgtcgcgctggcagctgatgtacccgcaggcgtcacactggcggaaaaacaaacactggtacgtaacaatggtagtgaagttcagagtttagatccgcacaaaattgaaggtgttccggagtctaatatcagccgagacctgtttgaaggcttactggtcagcgatcttgacggtcatccagcacctggcgtcgctgaatcctgggataataaagacgcgaaagtctggaccttccatttgcgtaaagatgcgaaatggtctgatggcacgccagtcacagcacaagactttgtgtatagctggcaacgttctgttgatccgaacactgcttctccgtatgccagttatctgcaatatgggcatatcgccggtattgatgaaattcttgaagggaaaaaaccgattaccgatctcggcgtgaaagctattgatgatcacacattagaagtcaccttaagtgaacccgttccgtacttctataaattacttgttcacccaagtactagtccggtgccaaaagccgctatcgagaaattcggcgaaaaatggacccagcctggtaatatcgtcaccaacggtgcctataccttaaaagattgggtcgtaaacgaacgaatcgttcttgaacgcagcccgacctactggaacaacgcgaaaaccgttattaaccaggtaacctatttgcctattgcttctgaagttaccgatgtcaaccgctaccgtagtggtgaaatcgacatgacgaataacagcatgccgatcgaattgttccagaagctgaaaaaagagatcccggacgaagttcacgttgatccatacctgtgcacttactattacgaaattaacaaccagaaaccgccattcaacgatgtgcgtgtgcgtaccgcactgaaactaggtatggaccgcgatatcattgttaataaagtgaaagcgcagggcaacatgcccgcctatggttacactccaccgtatactgatggcgcaaaattgactcagccagaatggtttggctggagccaggaaaaacgtaacgaagaagcgaaaaaactgctggctgaagcgggttataccgcagacaaaccgttgaccatcaacctgttgtataacacctccgatctgcataaaaagctggcgattgctgcctctagtttgtggaagaaaaacattggtgtaaacgtcaaactggttaaccaggagtggaaaacgttcctcgacacccgtcaccagggtacttttgatgtggcccgtgcaggctggtgtgctgactacaacgaaccaacttccttcctgaacaccatgcttagcaacagcagcatgaataccgcgcattataagagcccggcctttgacagcattatggcggaaacgctgaaagtgactgacgaggcgcagcgcacagctctgtacactaaagcagaacaacagctggataaggatagcgccattgttcctgtttattactacgtgaatgcgcgtctggtgaaaccgtgggttggtggctataccggcaaagatccgctggataatacctatacccggaatatgtacattgtgaagcactaatggcaatacgtggggcaggagtgtcctgctccacggtgtctgatttttatcgcattacagaaggcacaggccagaaggtagggcaatgttaaaatttattctacgtcgctgtctggaagcgattccgacgctatttattcttattactattagcttctttatgatgcgcctcgcgccgggaagcccttttaccggcgaacgtactttaccgccagaagtgatggccaatatcgaagcgaaatatcatcttaatgatccgatcatgacacagtatttcagctacctgaaacaactggcgcacggtgatttcggtccaagctttaaatataaagattatagcgtcaatgacttggttgcatccagttttcccgtttctgccaaactgggagccgcagcatttttccttgcggtaatactgggtgttagtgctggcgttattgccgcattaaaacaaaacaccaaatgggactataccgtgatggggctggcaatgaccggggttgttatccccagttttgtggttgcaccattattagtcatgatatttgcgatcattttgcattggctgccgggcggtggctggaatggtggggcgcttaaattcatgatattgccgatggtggcgttgagtctcgcttatatcgccagtattgcgcgtattacccgtggctctatgattgaagtattacactccaattttattcgtactgcccgggcgaaagggttacctatgcggcggatcattttacgtcacgcattaaaacctgctctgttacccgtgctctcttatatgggccccgcatttgtcggcattattaccggttctatggttatcgaaaccatttatggtttgccggggattggacaactgttcgttaatggcgcattgaaccgtgactattccttagtgttaagcctgaccatcctggttggtgctttaaccattttgtttaatgccattgtcgatgtgctatatgcggttatcgacccgaaaatccgttactgatactggagctcgcgatgatgttaagtaagaaaaacagcgagacgctggaaaatttcagtgaaaagctggaggtcgaagggcgcagcttgtggcaggacgcacgtcgacgttttatgcataaccgtgcggcggttgccagtctgatagtgctggtgctgatcgcgttatttgtaatcctggcaccgatgctttcccagtttgcctatgacgatactgactgggcgatgatgtccagcgccccggatatggagtccggtcactactttggtactgacagttccggtcgcgacctgcttgtgcgcgttgcgattggcgggcgtatcagtctcatggtcggtgttgctgcggcactggtggctgtggtcgtcgggacactttatggtagcctttccggttatctgggcggtaaagtggatagcgtaatgatgcgtctgctggaaatcctcaactccttcccattcatgttcttcgtcattttgctggtgacctttttcggtcaaaacatcctgctgattttcgtggcgataggcatggtttcctggctggatatggctcgtattgtgcgtgggcaaaccctgagtctgaagcgcaaagagtttattgaggcggcacaagttggcggtgtaagcacaagcggcattgttattcgccacattgtgccgaatgtactcggtgtggtggtggtctacgcaagtcttctggtgcccagcatgatcctctttgaatctttccttagcttcctggggttgggtacgcaagagccgttaagcagctggggtgcattgctgagtgatggcgcgaacagcatggaagtctctccatggttattgttgttcccagcgggattcctcgtggtgacgctgttttgtttcaactttatcggcgatggcttgcgtgatgccctcgacccgaaagatcgttaaggagtgcagccatgagcgtaattgaaactgcaactgtgccgctcgcacaacaacaggctgacgcactgctgaacgtgaaagatttgcgtgtcacctttagtaccccggacggcgacgtcacggcggtcaatgatttgaatttttccctacgtgccggagaaacgctgggtattgtaggtgagtctggtagcggtaaaagccaaactgcatttgcgttgatgggcctgttggctgccaacggacgtattggcggaagcgcaaccttcaatgggcgtgaaatcctcaatttgccagagcatgaactcaataaactgcgcgctgaacaaatcagtatgatttttcaggacccaatgactagcttgaatccctatatgcgcgtcggtgagcagttgatggaagtgctgatgctgcataagaacatgagcaaagctgaggcgtttgaagagagcgtgcggatgctcgatgcggtaaaaatgccggaagcgcgtaaacgcatgaaaatgtacccgcacgaattttctggcggcatgcgtcagcgagtcatgattgcgatggccttgttatgtcgacctaagctgctgattgcggatgaaccaacaactgcgctggacgtcaccgtacaggcgcagatcatgacgctattaaatgaactgaagcgggaatttaataccgccatcattatgatcacccacgatcttgtcgtggtggcggggatctgcgacaaagtgctggtaatgtacgccgggcgcacgatggaatatggcaacgcgcgcgatgtcttttatcaacccgttcatccttattctatcggtttgctcaacgcggtgccgcgtctcgatgcggaaggtgaaacaatgttgaccatcccgggtaatccgccaaacctgctgcgattaccgaaaggttgcccgttccagccacgttgtccgcatgcgatggaaatttgtagtagcgcaccgccgctggaagagtttacgcctggccgtctgcgtgcttgctttaaaccggtggaggaactgttatgaatgctgtaactgaaggaagaaaagtcctccttgaaatcgccgatcttaaagtgcactttgaaatcaaagatggcaaacagtggttctggcaaccgccgaaaacgctcaaagccgtcgatggtgtcactcttcgcctgtatgaaggggaaacattaggtgtggtaggggaaagcggatgcggtaagtccacctttgctcgcgccatcatcggtttggtcaaggcgaccgacggtcatgttgcctggttaggtaaagagttgctgggcatgaaacccgatgaatggcgtgccgttcgcagtgatattcagatgattttccaggatccgttggcaagcctaaacccgcgtatgaccatcggcgagatcatcgctgaaccactgcgtacttatcatccgaaaatgagtcgccaggaagttcgcgagcgcgtgaaggcgatgatgctgaaagtcgggttattgcctaacctgattaaccgctatccgcatgagttctctggtgggcagtgccagcgtatcgggattgcgcgtgctcttattcttgaaccgaagctgattatctgtgatgagccggtgagcgcgctggacgtgagtattcaggcacaggtggtcaacctgctccagcaattgcaacgtgagatgggattgagtttaatttttatcgctcatgacctggccgtggtaaaacacatttccgatcgtgtgttggtgatgtatctcggccatgcggtagaactggggacctatgatgaggtctaccacaatccactacatccttacaccagggcattgatgagcgcagtccccatacctgatccggatctggagaagaacaaaaccatccagttactggaaggggaattaccgagcccgatcaacccgccttccggttgtgttttccgtacccgttgcccgattgccggtccagagtgcgccaaaacacgtcctgttctggaggggagtttcagacactccgtttcttgcctgaaagtcgatccgctttaaaaacaataagggctgacagttgtcagccctttttcacgctaaaagcgattatttattcccgccagatgatatggcaaagtttgtgatctttttcgcggcataacagaatgcgggcaaaaacatcgttgatttcaccatcttcactgtccgccagaccaatcaccacttcggcaaaaaagtccgggttcaaatcgaaatcaacatgttcctgccagtcttccgccggatcgaataactccgcgccgccgcgctcttcaaactgaagattgaacagcagaacatcagctggatcgagattgtcggcagccagttcgagaaaaatatcgtaggcctgttcaagcgtttcatcttcagtcaggcgattgtttagatccatatccatagttactacctgtttaacctctgttggcgacgttttacagcaacggactgaagaagtaaaacagtcgctcggcgacacgttgccataatggacgttttagccataaacgggcatcgagcagacgactacggctaatataatcgtcctgaacggcggcgaggtcagcaccaaaacctttatcgtcgattgccagggtaatctcgaaatttagccacagactacgcatatcaaggttaactgtgccaaccagacttagttcgccatcgaccagcacgctcttggtatgcagtaacccgccttcaaactgataaattttaaccccagcagccagcagttccgtaaagaatgcgcgactggcccagccgaccagcatgctgtcattttttcgcggaaggataatactgacatccaccccgcgctgcgccgccgtgcaaatcgcatgaagtaaatcatcgcttggcacaaagtagggcgtggtcatgatcaaatattcacgcgcgctataagccgcagtcaataatgcctggtgaatgagatcttccggaaagccggggccagaagcaattgtgtgaatggtgtgaccgctggcctgttcaaacggcataatattgacatctggtggtggcggcagaatacgttttccggtttcaatctcccagtcgcaggaataaataatccccatcgcggtggcgatagggccttccatacgcgccatcagatcaatccattgccctacgcccgcatcttgtttgaagtagcgaggatcgaccatattcatgctgccggtgtacgcgatgtaattatcgatcatgatcatcttgcgatgttggcgcaggtccatacggcgtaaaaacacacgcatcagattgacctttaaggcttcgaccacttcaataccggcattacgcattagctcgggccacgggctgcggaaaaaagccacactcccggcggagtcgagcatcaatcggcaatgaatgccgcgtcgcgcagccgccattaaactttcagccacctggtccgccatgccgccgggctgccagatataaaacaccatctcaatattatggcgcgcgagctggatgtcgcggattaacgcctgcatcacatcatcactctcggtcatcagttgtagctgattccctttgaccccagcgatcccctgacgacgctcgcaaagcttgaataatggcgcagcgacactgctattttcttcggcgaagatatgcttacaggctttaaggtcgttaagccattttgcggtggaaggccacatcgctctggcgcgctcagcgcggcgtttgcctaaatggagctcgccaacggcaagataggcaataattccgactaacggcagaatgtaaataatcaacagccaggccatcgcggagggaactgcgcgtcgtttcattagaatgcgtaaagttacgcctgcaatgagcaaccagtatcccagaatggccaaccaactcaccaacgtataaacggttgtcatagattagaaatccttttgaaagcgcattgttatgagtttacgcatatggattcatctggcaaataaaaacgcgggaaaagcactggtcagcgtcgggggtgggggtataatgaccattctgttattgcatagagtagttaacatgaagcggagtagaacggaagtggggcgctggcgcatgcagcgtcaggctagccgacgtaaatcgcgttggcttgaggggcaatcgcgccgaaatatgcgtatccacagcatcaggaagtgcattctaaacaaacagcgtaactcgttattgtttgcgatctacaatatctaaatgtactgggcaccattgcggtgcccaataagtttactcttccgtctttaaactttatttttgcgcgctttctttactgtcagctttcgtttctagttcatcgttatcgctgaaaataccatgaccactgttcaacaacatactaacgagcatatcattattaatctcttcaccatttaaaactcgcgccagaatttcgctgccaaacagttgcggactgagaatgatatccggatgtaccatcttaatcttattcaggtttttgctatcactgacggcgagaactgttttgacatcactgctcatatcttttgcgctgagtacaacaaacgcgttatctgcatcgttatcactcagcgccagaatggcccggcaacgatcgattcccgctttctttaatacagaactgtcattactgtcaccggggataacatcagcattatcgcctaagcgttgctcaagttgcttgatatcatcttcaggcaagttgctgataaccgttacgttttgtccgcgttgattcagttgcaggatcgtattgatggcgagaatgctatgtccgcaaacaataaaatgatctttacgatgcattgtatgattgtttccttttacaagtttgttgaatcccccgcggataagcggaccaaaaatactggtcatagatgtggcaaaaacggtaatgccggaaataatgacgctaatagtgaacaatcgtgcactttcagaaacagggacaatatcgccatagccgacggtactcatggtttctatgctaaaatagaacgcggtcatcaaactttctattcgcggattaaaaccttcgcttaaataaagcgcaccgtaggtactgtaaaacagtaatgtcgtgaaactaataaatgcaaaaattgtcccggctgcggcgctactgtgggagaagtctttgcgcagtatcagcaaaaacaccagcgtaaaaatgcaaaatccaatactaaatttcagccagggataaaaatgcagggtgtaaattagcgctatcaacaacaaaatgatactgattgcccatgcgagctttgcccggaacagtaagccaatggagttcaggacaagaaagacgccgagcataaagagtggggcgtttgccagcaaggagagatccaactcactaaatgctttgatatggaaaatatcaagcaaattgacgctcataccatagattgttttaaaaataagcaatccatttaaaaagacggccagcgcgagaatgtcgtgccgaagggtcacccataaatttgttgctgtttgtttgaatgtagcccagtgactcactgatacctctgtaaccacaattttgtttaattatcttagcgtgcacattttctgaacatacatgcagcgcgtgaatgtgttaaacaatagtagatgactttatccgcagtaatcaaaggatttgagcgagcaactgtacctcaggaaaggtcatttttcctgaatatgctcacatcatataaagaaatacagataaagttattatctgcttgtggtggtgaatgcactgaccggctataaggaaaggccaaacaagaacacggttgcaaaaaccgtgcccttaaatattgaatctctattcagaacactttcttaaatggtttcacactaacgtgttcatagactcctgccgctacgtacgggtcagcatcggcccaggcctgagctgcttccaggctttcaaattcagcaataacggtactgccagtaaatcccgcagcccctggatcgttactgtctaccgctggcattggaccagctgtcaacaaacgaccttcatcatgcagtaactgtaaacgtgctaaatgtgccggacgaacggaaaggcgtttttcgaggctatcagctttgtcttgagcgtaaataacatacaacacgggcacaactccttgttcgggaaagttgtaaagtacgttatttgaaagggcgaagatctgcaacggaaagatgatgtctttgttaaggccatgcataaagtaagggtaattacgccaaaaatgacattttcactgatcctgatcgtcttgccttattgaatatgattgctatttgcatttaaaatcgagacctggtttttctactgaaatgattatgacttcaatgacccttgatttacctcgccgcttcccctggccgacgttacttagcgtctgcattcatggtgctgttgtggcgggtctgctctataccagcgtacatcaggttattgaactacctgcgcctgcgcagccgatttctgtcacgatggttacgcctgctgatctcgaaccgccacaagccgttcagccgccaccggagccggtggtagagccagaaccggaacctgagccgatccccgaaccgccaaaagaagcaccggtggtcattgaaaagccgaagccgaaacctaagccaaaaccgaagccggtgaaaaaggtacaggagcagccaaaacgcgatgtcaaacccgtagagagccgtccggcaagtccgtttgaaaatacggcaccggcacgcctgacaagtagtacagcaacggctgcaaccagcaagccggttaccagtgtggctagtggaccacgcgcattaagccgtaatcagccgcagtatccggcacgagcacaggcattgcgcattgaagggcaggttaaagttaaatttgacgttacgccggatggtcgcgtggataacgtacaaatcctcagtgccaagcctgcgaacatgtttgagcgtgaggtgaaaaatgcgatgcgcagatggcgttatgagccgggtaagccaggcagtgggattgtggtgaatatcctgtttaaaattaacggcaccaccgaaattcagtaagcagaaagtcaaaagcctccgaccggaggcttttgactattactcaacaggtaaggcgcgaggttttccttcaggatcaaccgcgacatacttaaataatgcttctgtcgctttatagcgttgcccaattggttcagacgctacttttttcacccacacttcaatattaatgctgacgcttgtcgtccctttctggacacagcgtgcatagcagcacaccacatcgccgaccgcaaccggccgtaagaaagtcattccttcaacccgcacagtcactacgcgaccgtgggcaatttcttttgccagaatagcgccgccaatatccatttgactcattaaccaaccaccaaagatgtcaccattggcattggtatcggcgggcatggctaaagtacgtaaaacaagatcgccctgagggacgttatgtgttgtagacatggtaaaaccgacttaaaaggaaaatcacaggcgcgatgctactatgattttcctgaggagaacagaggagatacagcgccagccccgaaggactggcagtctggttaggatttatcttcctgcggcatgtggcggtagatatagataccgcttaacaatgtgaagattaaggtaagggcggtcaggccaaagactttaaagttgacccaaatattttgcggcagccagaatgcgatgtagatgtttgccagaccgcaaaggataaagaaaacagcccaggccagattcagcttgctccataccggttgcggcagcgtgagttctttacccagcatccgctgaattagcggctttttcatcacccattggctgactaacagggctcccgcaaatagagcataaatgacagtaaccttccatttaataaactcatcattgtggaagaacagcgtcaagccaccgaagacgaccaccagaacaaaagtgatcagggccatcttctcaaccttacgaaagcgaacccagctatagataagcacaatcgccgtggcgacgatcagcgccgcagtagccgcatagatgtcataaatcttgtaaaacgcgaaaaagacaaccagcggtaaaaaatcaagaaactgcttcattttacgattccgtaatcaaatgcttaaggttattggcgaatcaacatatacaggcggaacagatagatgagcaatatggcactaatcaggttgctcaaggtgttcgccagtacggcaccaatttccggggttaatgcggcaaaagaagaggcaaaaagcagcaacagtgtttttgccagcaaccagctcagtactgcgggtgccaccagacgcatattcgcccaagtcagccgcatactgctacgcatgctggcaaaaacgcccattttgtcctgtaccaacatcaccggtgccagggccagtaaaatggccatgataattcccggaacgaccaccagcatgatgccaatctgtactaaaagggtagtcagaaaaatcagaataaataactttggcaatatcggcgcactggcaccaatagctcgcagcgcactgactctctgacccgcagacaccagctggataattaatattacgcctccggcgagaatggcgttaccgattaatccactaaaagtggacgccgcactagcctgcagcaaaatttgttgctgttccggactcatattctgaaccaggtcgaacaacccactactgccgctaacgggcacgccgtcattgagctgcgcaagctgtgcatcactgggactgaaaacatgccctaacaccactgtgataaacgcacatagcaagcttaccaacagaatggtcataaattgattacggaagaaatttccggtgtcacggtatacggactgcgccgtgatagacatgcactctccttgagttttatgcaggtgttaattagcgggcaattgtaccctggttaagcctcgggtggcagcatcaggtcttgtatggaaaagcatatctttgtaaagcggaggtaattgctggccttcaggcatgggcaaatcgcggcaagtggcgaccgagttaatatttgcgtagcgaaaatatttaaaaattgatttaaatcacattaaccaggattctcaatgcaacttctaaattaatccagatcaataaagggtgaattatcatatgtaatgtgatctatgtaggatcatttgttactccaatgtaggtatattcgtcacgtttttataaccataacgacggagcggatatgaaaaagttaacagtggcggctttggcagtaacaactcttctctctggcagtgcctttgcgcatgaagcaggcgaattttttatgcgtgcaggttctgcaaccgtacgtccaacagaaggtgctggtggtacgttaggaagtctgggtggattcagcgtgaccaataacacgcaactgggccttacgtttacttatatggcgaccgacaacattggtgtggaattactggcagcgacgccgttccgccataaaatcggcacccgggcgaccggcgatattgcaaccgttcatcatctgccaccaacactgatggcgcagtggtattttggtgatgccagcagcaaattccgtccttacgttggggcaggtattaactacaccaccttctttgataatggatttaacgatcatggcaaagaggcagggctttccgatctcagtctgaaagattcctggggagctgccgggcaggtgggggttgattatctgattaaccgtgactggttggttaacatgagtgtgtggtacatggatatcgataccaccgccaattataagctgggcggtgcacagcaacacgatagcgtacgcctcgatccgtgggtgtttatgttcagtgcaggatatcgtttttaattccgcacaaaaacgaccccgtaatatacggggtcaataaggacatggtataaagggtattatttcttcgcttctacgccatcagtttcagagcgaattaaaaatttctcagttgtttgcggaatattctgaatcagccagtcggccatttgcttttcctcatttaaaatcgcttcgatggttggaatactagctgtatcaccggcattttttgctgctgctaatagactggtgtaacaggcgatttcaaattgctcgaagacatatccgctaatagagcctttgactatttcatcagaagggaatataccaccgatactctgcccaagcgcagccattttactcatggaatctttaatgacactacgactaatgtcattacgatcaagaatagtttccagttgaacaatctggtttttggtttcactaagatgttgttcaatacgagcgcgtagttcaggataattatctatacggctggccatggattcaagcatagattcggcttgcttttccattgcgtgggcgtcacgtaaccagtcatgataatgttcaatacgattcatgaaaatgtcctctttataaaatgactaaaagttaaaattcatatttcaggctttattttcggctttcttatttacgttattaatggccagatcagtcagtttgatgtcggtggccttttcttcttccagggtttctttcagaagcttcgctgctttacggtaacctaattgttcagccagcgtcgctaatgtcccgtaactggcaatctcataatgctcgactttctgtgctgcggcaatcagtgcggcatcacgcacttcgtttttctcggtactttcgatgacctcattagcttcttcaataagaccttccattgccacacatttcatgcgcttaattttcaggttgctttcggactccacaacttgatcaatacgttcaatctgtccatgagtttcctcgaggtgcgcatgaaaagcctgacttaatttttcattacttgttgctcttgcgagttttgccagtgcccgggttaattgtttttctgcgctgtaggtatcactaagcaggtgaataaatacatcttcaatggtcttcatattcatatttttctccagtgaaatcactgcgagccatacggcccgcagatgcaattatctttatcagctgatattaataattaacggtgaatcaggatttgccacttttattaccaccgctttgttgaccgccttttttacccgcttcagatgcgcgttgcggatcatttttaaaattaccgccgctatgctgaccgcctttacggcctgcgtcggatgccttctcacggtcttcggcgaaatttccactaccaccacgatgttcggccatgttatttctcccgttgcgttgcattgtttcattaatatgagtgttgtgtgtcgacactcattaaaattagtcgctaatgagaattagtcaaattaagcgcaacgagaagatagagggaaaatatattttgaggaacattctggatatattaacaattacctgaggaataagtgacttagagaaaattattgattttactggtgttatgttgcgggattaatttgtttgattatattactgttgggcggaaaaatgacgtaagttgacgttcgaccggggtaagcgaaacggtaaaaagataaatattaaatgaatttaggatttttccggcttcattaaagaaagttaaaatgccgccagcggaactggcggctgtgggattaactgcgcgtcgccgctttcatcggttgtacaaaaactttcagtgccgccagcattttctctggctcattaatatgttgctcgatgattttaacaatggcgctaccagaaatcgcgcccgcagctcctgcatcaatcgctgcttttacctgatccggggcggaaataccaaatccctgcaatggaggtgcagcgttgtactctttcagcttcgcaaccagatgattgaggggtaacgcggcgcggttttctgcgccggtcacgcctgctcgactcagcaaataggtgtaaccacgaccgtaagaggctatctggcgcagcaggtcgtcatcggcatttggcgggcagatgaagataggtgcgacattatgacgcaacgcggcctggcggaagggcgcggactcttcaactggcacatcggcaaccagcacgctatcgacgccgactttttcgcactgggcataaaactcatcaatgcctttgttaaacaccagattggcatacatcaacaggccaatgggaatggtcgggtgtttctggcgaatcagtgccagcatttcaaaacattgtgccggagtcacacctgccgcaaaggcgcgcagagtggcgttttgaatcgtcgggccatccgccagtgggtcggagaaggggatacctaactccagcgcgtcagcaccggcttcaattagcgtatcgataattttcaaactctgctcaatgcccggatcaccgagcgtgacgaaaggaacgaatgcgccttctttgcgctccttcaactgggcaaacagagattcgtagcgttccatcagatttcccctcgtgctttcaaaatatcgtgaacggtgaagatgtctttatcgccgcgaccggaaaggttaaccaccagtagctgctctttatccgggttttcgcgcatcattttcaacgcatgggccagggcgtgggaggattccagcgccgggatgatcccttcgtgcaggcacagcgttttgaaggcttcaagggcttcatcatcggtaatagacacgtaatcagcgcgtccagtgctgttaagatacgcgtgttgtgggccgacagacgggaaatccagtccggcggagatggagtaagattcttcaatctgcccgtcttcggtttgcatcatcggcgctttcataccgaaatagatacccacgcgaccatgttttagcggtgcgccgtgctcgccagtttcgataccgtgaccacctggctccacaccaatcaggccgacgttggtttcattgatgaaatcagcaaacatgccgatggcattgctaccgccgccaacacaggcgataacggcatccggcaggcgaccttctctttccagaatctgcgctttggtttcttcgccaatcatccgctgaaactcacgcacaatggtcggataaggatgcgggccagctgcggtgcccagcatatagtgcgcggtttcgtaactaccggaccagtcgcgcagcgcctcgttacaggcatctttcagcgtcgcggaaccgctatgcaccgggatcacttccgcacccattaagcgcatacgaaaaacgttagggctctggcgttcaacgtctttggcacccatataaatacggcatttcaggccgagcagggcgctggcaagggcgctcgccacgccatgctgaccggcaccggtttcggcgatgatttcggttttacccatccgcttcgccagcaacgcctgccccagcacctggttagttttatgcgcgccgccgtgcagcaaatcttcacgcttgagatacagcgtggtgttcgtcccggctgtaatgttctggcatttggtcagcgcggttggacgcccggcatagtttttcagcaggtcgttgaactgagcctgaaattcaggatctttttgcgcactgacaaaagcttcttccagctggcgcagagcaggcatcaggatttgtggcacgtacatgccgccaaactcaccaaaataggggttaagtaatgttgtcattgttcctttccttaatatgcgcgcagcgtctggaaaacgctggccaaaagacgtgcgtctttgatgcccggttggctctctacagcagaattaaaatcaagtccggcgcagccggtttgtgccgcttccacgcagttatctgcgcctaagccccccgccagcagaacgttgccaaggctttgaccatttaatagactccagtcaaaacgttgcccgcttccaccctggccgttgtctaaaacatatttatcaacgtgctgaaactcgcgggcgggcagggtttcaccgacgcttaatgctttccagatggcaacatgtgctggcagagcttcacgcagcgtatcgatatacagctgttcttcattaccatgcagttgcactgccgccaggcttaacaccttagctttgtccaccacatcggcaatatcgtgattgcggaacacgccaacatactgcaacggtgccgcagccatcacttcctgcgcctgttcaacgttgacgcaacgcggacttgtcgcaacaaaaatcaacccaccgtaaatcgcgcccgcgtcataagctgctttagcatcttgcccacgcgtcaggccacatactttattctcacccagcaacacccggcgcacggcggcgtgcaaatcgtcatgggccatcaacgcgctaccaatcagaaaaccgttagcgaagtggcttaactcgcgcacctgagcgtaagtattgatgccggattcgctgattaccgtcacgttgtgccccagtttcggcgcaagctcgcgggtacggttgagatcaatgctcaaatcacgcagatcgcggttgttgatgccaacgacctttgctcccaatgcaatggcgcgctcctgttcctcttcattactgacttcggtcagcacccccatctccagactgtgagcgacggcggcaagctggcgatattggtcgtcatccagtacactaagcattaataagcaggcatcggcctggtaatagcgcgccagatagatctggtaagggtcgataatgaagtctttacataaaatcggctgcggggcgatttggctgacgatggggaggaaattaaagctcccctgaaaatatttctcatcagtcagcacgctaattgcgctagcgtaatgtttataaatggcggcaatgcgtgctggatcgaaatcatcacggatcacgcctttactcgggctcgctttcttgcactccagaataaacgccgtgcgcgcaccctgtagcgcatcataaaaatgtcgcgtgctcggctgaacctcattctgaaaactggccagcggttgctgctgtttgcgggcttctacccaaatcgccttgtctgcgacgattttcgctaaaacggtttgcatcatttaccctcgtgccgccagtgcggtgactctgtcgtaagcggaaccactgcgcagtacctcaagaacggtttgcgcattggcttgcagatcttcatggccatgcaggcgcattaacatggcgacgttcgcagcgacggctgcttcatgggcggcgtcgcctttaccttgtaacaaacgtgttaaaatgtcacggttttcttccggtgttccgcctgccagttgctcctggtggtagggtgtcaggccaaagtcttctgcggtgagctgatagcttttaatttcgccgtcatgcagttcggcaacgattgtcggcgcgtgtaaactaacttcatccatcccgccgctgtgcaccaccgccgcgcgttgataccccagcacgcgcaaggtttcggcaatcggcagcaccagttccggactataaacaccaattaacgccagcggcggatgcgccgggttaatcaatggccccagcacattgaacagggtgcgggttttcagttgctggcgaaccggcatcgcgtggcggaatccggtgtgatacttcggcgcaaagaggaaacatacacctaactcatccagcgcctggcggcttttatcggcgttcatatcaagattaataccgaacgccgccagcagatcggagctaccagatttactggagacgctacggttgccgtgtttcgccactttcagcccacaggccgcggcgacaaacgcactggcggtagaaatattgatactgttgctgccgtcaccgccagtaccgacgatatcagcaaacagataatccgggcgcgggaacggcgctgcgttttccagtagcgcggttgctgccccggcgatctcgttcgggtgctcaccgcgaattttcatgctcaccagcgccgccgccagttgttccggcttcagctcgccacgcaccaccgcactaaacagctggtggctttcttgttggctaagcgtctgcgcctgatacagtttttccagaatcggttgcagcgtgttggctggctctagtttctgctgcgcccaggccagcgtttgttccagcaggcgagcgccctgggtggtgagaatggattccggatggaactggaatccacaaacgcgatccgcatcgtgacgtactgccatcaccatgccattaaaatgggcgttgatggttaaaccggccggaatgttactgccaaccaggctgtgataacgcgccaccggcagcgggtttgttaatccggcaaacatcgcctgaccgtcatgttcaatgctggaggctttaccgtggagaatttcgcccgcctgaccgacatagcccccgtaagcttcgacaatcgcctgatgtccgaggcaaatgccaataatgggcagcttgccacgcaagcgggtgaggagttccggcatacaaccggcttcgctcggcacaccggggccaggagaaagcatcagcaccggattgctcatggtcgccaggcgttcaattaaggtttgcgccggaatatggttgcggtaaatcaccacgttatgcccattgctgcgcaactgatctgccaggttgtacgtaaaagagtcgatattatcgagcagcagaatgtcagccatcagaaagtctcctgtgcatgatgcgcggtggcaatagcgcgcagtacagcgcgggctttgttacgggtttcgtcggcttcgctctgcggaacagaatcaaggactacaccagcacccgcttgcacggtggcgataccgttttccaccagcgcgctgcggatcacaatgcaggtgtcgagatcgccatgcgcggtgaaataacctaccgcgccgccgtagctgccgcggcgacgaccttccgcctcggcaattaactgcatagcgcgtactttcggcgcaccgcttaacgtccccatattcatacaggcgcgataagcgtgcagggcgtcaagatcgtgacgcagttcgccgactacgcgagagacgaggtgcatcacataggaataacggtcaactttggtgagatcggcgacgtagcggctgccgggggtgcaaatgcgtgccagatcattacgggcgagatcaaccagcatcagatgttcagacagctctttatgatcggtacgcatttccagttcaatacggctgtcgagatctctgtccagactaccatcggcgcgacgaccgcgtgggcgtgttccggcaatcgggtagatctcaatctggcggctggtggcatcatacttgaggctgctttccgggctcgcgccaaatagggtgaaatcattatcctgcataaaaaacatgtacgggctgggattactctttttcagcacgtaataggccgccagcggactcgggcagggcagagagaaacggcgagatggcaccacctggaaaatttctccagcgcgaatcgctttttgcaacaaacgcactacgccaccgaactcttcatcgctctgattacattcacaacgcatatgcggcacggaaaccactggcagcggcggcgcggcttcggtcagttgctgacgtagttcgttcaggcgagcagtgagacgttgtttttcttcttcattcggagcaaacaggctggcctgaatacgggtgctttttttctgatggtcaatcaccatcagcgtttcagcgagataaaaacagaaatcagggcagttattttccgcactcagttgcggtaaatcttcaaatcccgccacaaggtcataagagaacaggccgccgaagaacatggcttctcgttcttccttcggtacattcaacagattctgcaataaacggaaagcgtcaaaaacgctaagggagcataagcgggcgtcttcatccagcagtggactgacaggggggaagcgcagcacacggcagtttggactttgttcactttccacacccgcaggcagggcgttatccagtagtgccaggagggcttcgccgttgccggaaagtgcctggattgtgacagtgtcacctaaagctgtaatgcgcagcgcactgtctaccagcagcaggctttttaaatcatctttgctgtcgatatctgcggattccagcagcagcgttgccggacgatccccacacaactggtgaaaaagcgcggtgggattgtcgcgataagcgccttcgcaggttagcagttcgagagtcggtttttgtgtttgcattgttattctctaattttgttcaaaaaaaagcccgctcattaggcgggctgggtatctgattgctttacgcatggtgaatacactgcccgtttcaggaagtgcgccaccaacctttcagtacgaaaattgctttcattgtcgataccctttttacgtgaacttgcgtactagttaactagttcgatgattaattgtcaacagctcatttcagaatatttgccagaaccgttatgatgtcggcgcaaaaaacattatccagaacgggagtgcgccttgagcgacacgaattatgcagtgatttacgacctgcacagccataccacagcttccgatggctgcctgacgccagaagcattggtgcaccgtgcagtcgagatgcgcgtcggcaccctggcgatcaccgaccatgacaccacagctgcaatcgcgccagcaagagaggaaattagtcgtagcggactggcgttgaatcttattcccggcgtggaaatttccacggtctgggaaaatcatgaaattcatattgtcgggctgaatattgatattactcatccgctaatgtgtgagttcctcgcgcagcagacagaacggcgcaatcagcgggcgcagctgattgccgaaagacttgaaaaagcgcaaatacctggggcgctggaaggcgcacaacgactggcgcagggcggcgcagtgacgcgcggtcattttgcgcgtttccttgttgagtgcggcaaagccagtagtatggcggatgtctttaaaaagtatctggcgcgcgggaaaaccggatacgttccgccacagtggtgtacaatagaacaagctattgatgtcattcatcattctggcggtaaggcggtgctagctcatcctgggcggtacaatcttagtgctaaatggctgaaaagattggttgcgcattttgccgaacaccacggtgacgcgatggaagtcgcgcagtgccagcaaagccccaatgaacgtacccagctggcggcccttgcgcgtcagcatcatttatgggcaagtcaaggatctgattttcatcagccatgcccgtggatcgaactgggtcgtaaactctggctgcccgcaggcgttgaaggcgtctggcagctatgggaacagccgcagaacaccacagagagggaattatgagccagtttttttatattcatcctgataacccacagcaacgtctgatcaaccaggcggtggagatcgtgcgtaaaggcggggtgattgtttatccaactgattccggctatgcgctcggctgtaaaattgaagataaaaacgcgatggagcgtatttgtcgtattcgccagctgccggacggtcacaactttaccctgatgtgtcgcgatctttctgaactcagcacctatagttttgttgataacgttgcgtttcgtttaatgaaaaacaacacgccgggcaactataccttcatcctgaaggggacgaaggaagtgccacgccgtctgttgcaggaaaaacgcaaaaccatcggtatgcgtgtgccttctaaccctatcgctcaggcgttacttgaagcattgggcgaaccgatgctttccactagcctaatgctgccaggcagcgaatttaccgaaagcgacccggaagaaattaaagatcgtctggaaaaacaggtagatttgattattcacggcggctatctcgggcagaaaccgacaacggttattgatcttaccgatgatacgccggtcgtggtgcgtgaaggcgtaggtgatgtgaagcctttcttataacaaattgcgttccacggatggaagactatggcagggaagtttcgctgcattttgctgttgatagcagggctgtttgtaagttctctaagttatgcagaaaacacggagatcccttcttatgaagaagggatcagcctctttgatgttgaagccactctgcaaccagatggggtgctcgacatcaaagaaaatattcattttcaggcgcgaaatcagcagattaagcacggcttttatcgtgatttaccacgactatggatgcagcctgatggggacgctgcactgctgaactatcatattgttggcgtcacccgtgatggtattcctgaaccctggcatcttgactggcatatcgggttaatgagtattgtcgtgggcgataaacaacgtttcttgcctcaaggcgactatcattatcaaattcattatcaggttaaaaatgctttcctgcgtgagggggattctgatctgctaatctggaacgtgaccggtaaccactggccgtttgaaatttataagacccgtttttctctccagttctctaatattgcgggtaatccatttagcgaaatcgatctttttaccggagaagagggcgacacatatcgtaatggccgcatccttgaggacggaagaattgaatcccgcgatccgttttatcgtgaagatttcacggtcctctaccgctggcctcacgctttacttagcaatgccagcgctccgcaaacgacgaatattttcagccatcttcttttaccctccacgagtagcttgttaatttggtttccgtgtctgttcctggtttgtggatggttatatctctggaagcgcaggccgcaatttacgccggtagatgtgattgaaaccgatgtcattccgccagattacacgcccggcatgttacgtctcgatgcgaagctagtttacgacgataaaggtttttgtgccgatatcgtaaatctgattgtgaaaggaaaaattcatctggaagatcagtctgacaagaaccagcaaatcctgattcgtgttaatgaaggcgcgaccagaaataatgcggtattactgcccgcagagcagttattactggaagcgttatttcgtaaaggcgataaggtcgttcttacggggagacgcaacagagtcttacgcagggcatttttacggatgcagaaattttatctgccgcgtaaaaagtctagcttttaccggtctgatacttttttgcaatggggtggactggcaatattggcggtcattctttacggtaacttgagtcctgtaggctgggcaggaatgagtctggtgggcgatatgtttattatgatctgctggattattccttttttattttgttcccttgagcttttgtttgcccgcgatgatgacaagccttgcgttaatcgtgtaatcatcactttgtttttaccactgatttgtagtggcgtggccttctattctctctacatcaatgtcggagatgtattcttttactggtatatgccagcgggttattttaccgctgtttgcctgaccggttatctcactggcatggggtatatttttctgccaaagtttacccaaactggacagcaacgttatgcccacggtgaagctatcgttaactatcttgcgcgtaaagaggcagcaacacacagtggacgtcggcggaaaggggaaacacggaaactggattacgcgttgctaggttgggctataagcgcaaatttggggagggaatgggcgttacgcattgcccctagcctttctagcgcgattcgcgctccagagattgcccgtaacggcgttttattcagtttacagacgcacctaagttgcggggccaataccagtttgttggggcgaagttattccggtggtggtgctggcggcggcgcgggtggcggaggcggtggtggctggtaattaagctgatgttaatcgaaacaagctttaaccataaagatagtgtagtatgttgcgcctcaaagccaggccgataaacgtcgagtcgtttacttaaggcctgaagagttcaaacagactttactatcagtgagtcagatgtaagttctgactcactgttgcacaaaagcatatcagacgcctgggaaggcgacaccaaaaggaagctctatgagcgaaaagctacagaaagtgctggcgcgtgccggccacggttctcgccgtgaaatcgaatctattattgaagccggtcgtgtgagtgttgatggcaaaattgctaaactcggcgatcgtgttgaagttacccctggattgaaaatccgtatcgatggtcacctgattagcgtacgtgagtccgctgaacaaatttgtcgcgttctggcctattacaaaccggaaggtgagttgtgtacccgtaacgatccggaaggacgtccaacggtgtttgaccgtctgccaaaactgcgtggcgcacgctggattgccgtgggtcgcttggacgttaatacctgtggtctgctgctgttcaccaccgatggtgaactggcaaaccgtttaatgcacccaagccgtgaagttgaacgtgaatatgccgtgcgtgtatttggtcaggttgacgacgcgaaactgcgtgatttgagtcgtggcgtgcagttggaagatggtccggcagcttttaaaaccatcaagttcagcggcggcgaagggatcaaccagtggtacaacgtgactctgaccgaaggccgtaaccgtgaagttcgtcgtctgtgggaagcggttggtgtgcaggtgagccgcctgatccgtgttcgttacggtgatatcccactgccaaaaggtctgccacgcggtggctggacggagctggacctcgcccagactaactatctgcgcgaactggtggagctaccgccagaaaccagctctaaagtcgctgtagaaaaagaccgtcgtcgcatgaaggcgaatcagattcgtcgtgcggtgaaacgtcacagtcaggtgagcggcggtcgtcgttctggcggacgtaataataacggttaatcaaagtatgccggacgtcatatccggcatttttacagattaataatcgatccctatctgcgcttttacaccggcatcaaacgcatgtttgacggggcgtaattcacttaccgtatctgccagttcaagaatatcccgatgacaaccacgacccgtgataatcaccgtctgttgatgtggacgttcatttaacgcctgcaccacttcttccagtggcaaatagtcatacgccaccatatacgtcagttcatcaagcaaaaccatatccagactggaatcagcaagcatccgctttgcatgttgccagacttcgcggcaggcggcggtatcagactcgcggttttgtgtatcccaggtaaagcccgttgccatcacctgaaactcaacgccatgtggctccagcagattgcgttcgccattaggccaggtgcctttaataaactgcacgacgcctactttttttccgtgaccaactgcgcgtgttgccgtaccaaatgccgcggtggttttgccttttccattgccggtaaagacgatgataataccgcgttcatcctgggcctgggccacacgagcatctactttttctttcactcgctgctgacgctgttggtagcgttcatcactcattgggaaattcctggtttacggcccggttgggcgtcaaaggtcatgccggttttacggcggctgtcatcgcccatcagccagaggtagagcggcatgatatcagcgggtgttttaagtttctgtggatcttcggtcgggaaggcgctggcacgcattgcggtgcgcgtaccgcctgggttaatgcagttgacacgcaggcgctgctgatattcatcggccagtacctgcatcatcccttcggtggcaaatttgctcgctgcatatgcaccccagttggctcgtccctgacgtccaacgctactactagtaaagaccagactaccggcgtcgcttttgagtaataaaggaagcagtgcctgggtgagcataaaggtggcattaacgttgacctgcatgacgtcctgccagacctgcggattttgttcgctcattgggcaaacatcgccgagcaatccggcattatgcaaaacaccatccagacgcggataattaacggcaatgcgctgtgccagttgttggcaattttcggacgtgcaggtcagcaaatcgagaataaaccactgtggctgacgcccagtttcttcgtttatgtggctggctacctgacgtaatttttcttcattacggcccaacagaatcactgtcgcaccatagcgtgcatacgtcatcgcggcttcacgaccaataccatcgctggctcccgtcaccaggataatgcgatcattgagtaaatcttgttttggctggtaatgcatggctactcctcaacgacgttgtctgtcgcgctgccagtgtactttatgactttggggctttatgcctgaaacagaagggcatttcaatcagcctggggcgataacaccgcaaaatggatactttgtcatactttcgctgcaataacatctctgcgagacggcttaacatgcctgttgtaaactgtgagccaaagcgttgtttaaccaaggtggggactcgtggaattgttgtctgaatatggtttgtttttggcgaaaatcgttaccgttgtgctagcgattgcggcgattgccgccattattgtcaatgttgctcaacgtaataaacgccagcgtggcgagttacgggtcaacaatctcagcgaacagtataaggagatgaaagaagaactggccgcggcgctgatggacagtcatcagcaaaaacagtggcacaaagcgcagaagaaaaagcataagcaagaagcgaaagcagcaaaagcgaaagccaaactgggcgaggtggcaactgacagtaaaccccgcgtctgggtgctggattttaaaggcagcatggacgcccatgaagtgaacagcctacgtgaagagataacggctgtactcgcagcattcaaaccgcaggatcaggttgtgctccgtctggaaagccctggtggcatggtgcatggttacgggctggcggctagccaactgcagcgtctgcgcgataaaaacattcctttaactgttacggtagacaaagtcgctgccagcggcggttacatgatggcctgtgtggcggacaaaattgtttccgcaccgtttgctattgtgggttccattggcgtggtggcgcaaatgcccaactttaaccgcttcctgaaaagcaaagatattgatatcgaactgcacactgccgggcagtataagcgcacgctgacgttgctgggtgaaaataccgaagaagggcgggagaaattccgcgaagagttgaacgaaacgcatcagttgtttaaagattttgtgaagcgtatgcgtccttctctggatattgaacaggtggcaacgggtgaacactggtacggacaacaggcggtagagaaaggcctggttgatgaaatcaacaccagtgatgaagttattcttagcctgatggaaggccgtgaagtggtcaatgtacgctatatgcagcgtaaacgactcattgaccgattcaccggcagcgcggcagagagcgccgatcgattgttgctacgctggtggcagcggggtcaaaagccattgatgtaaaagacaaacgcgaggctaagacctcgcgttttgctttaatcaaccagatgatatttttcactaagcacatgggccaggtgtttgaacatattaaacaccgcggtgcttttggctgttggcaatccttgttcatctaaaaagtagtcgccggtaaataccagcacgccattacgctgcgtgacgccggtggcttcaatccctgcgagcgtatcctcatgctcacgaatgattttgttggcctctttcaacagcgtttcgcggtcgatgggttgtgtctctttgttcattatttactccttaaacaaggacattagtctacgccaggcatggcttgcagacaaatataccacgctggtggcaagagcgccttactggcaactttggattttgcatgctaataaagttgcgtatcggattttatcaggtacagtgtgacgctttcgtcaatctggcaatagatttgcttgacattcgaccaaaattccgtcgtgctatagcgcctgtaggccaagacctgttaactcagtcacctgaattttcgtgaacagagtcacgacaaggggttgatatccgcagagagcgagtccatatcggtaactcgttgccagtggaaggtttatcaacgtgcgacgcattcctggaagaatcaaattaggtaaggtgaatatgggtaaagctcttgtcatcgttgagtccccggcaaaagccaaaacgatcaacaagtatctgggtagtgactacgtggtgaaatccagcgtcggtcacatccgcgatttgccgaccagtggcagtgctgccaaaaagagtgccgactctacctccaccaagacggctaaaaagcctaaaaaggatgaacgtggcgctctcgtcaaccgtatgggggttgacccgtggcacaattgggaggcgcactatgaagtgttgcctggtaaagagaaggtcgtctctgaactgaaacaactggctgaaaaagccgaccacatctatctcgcaaccgaccttgaccgcgaaggggaagccattgcatggcacctgcgggaagtgattgggggtgatgatgcgcgctatagccgagtggtgtttaacgaaattactaaaaacgcgatccgccaggcatttaacaaaccgggtgagctgaatattgatcgtgttaatgcccagcaggcgcgtcgctttatggaccgcgtggtggggtatatggttagcccgctgctatggaaaaagatcgctcgtggcctgtctgccggtcgtgtgcagagcgtggcggttcgcctggtggtcgagcgtgagcgtgaaattaaagcgttcgtgccggaagagttctgggaagtcgatgccagcacgaccacgccatctggtgaagcgttggcgttacaggtgactcatcagaacgacaaaccgttccgtccggtcaacaaagaacaaactcaggctgcggtaagtctgctggaaaaagcgcgctacagcgtgctggaacgtgaagacaaaccgacaaccagtaaacctggcgctccttttattacctctacgctgcaacaagctgccagcacccgtcttggatttggcgtgaaaaaaaccatgatgatggcgcagcgtttgtatgaagcaggctatatcacttacatgcgtaccgactccactaacctgagtcaggacgcggtaaatatggttcgcggttatatcagcgataattttggtaagaaatatctgccggaaagtccgaatcagtacgccagcaaagaaaacagtcaggaagcgcacgaagcgattcgtccttctgacgtcaatgtgatggcggaaagcctgaaggatatggaagcagatgcgcagaaactgtaccagttaatctggcgtcagttcgttgcctgccagatgaccccagcgaaatatgactccacgacgctgaccgttggtgcgggcgatttccgcctgaaagcacgcggtcgtattttgcgttttgatggctggacaaaagtgatgcctgcgttgcgtaaaggcgatgaagatcgcatcttaccagcagttaataaaggcgatgctctgacgctcgttgaacttacaccagcccagcactttaccaagccgccagcccgtttcagtgaagcaagcctggttaaagagctggaaaaacgcggtatcggtcgtccgtctacctatgcgagcatcattagcaccattcaggatcgtggctacgtgcgagtagaaaatcgtcgtttctatgcggaaaaaatgggcgaaatcgtcaccgatcgccttgaagaaaatttccgcgagttaatgaactacgactttaccgcgcagatggaaaacagcctcgaccaggtggcaaatcacgaagcagagtggaaagctgtactggatcacttcttcagcgatttcacccagcagttagataaagctgaaaaagatccggaagagggtggtatgcgcccgaaccagatggttctgaccagcattgactgcccgacttgtggtcgcaaaatggggattcgcacagcgagcaccggggtattccttggctgttctggctatgcgctgccgccgaaagagcgttgcaaaaccaccattaacctggtgccggaaaacgaagtgctgaacgtgctggaaggcgaagatgctgaaaccaacgcgctgcgcgcaaaacgtcgttgcccgaaatgcggcacggcgatggacagctatctcatcgatccgaaacgtaagttgcatgtctgtggtaataacccaacctgcgacggttacgagatcgaagagggcgaattccgcattaaaggttatgacggcccgatcgttgagtgtgaaaaatgtggctctgaaatgcacctgaaaatggggcgtttcggtaaatacatggcctgcaccaacgaagagtgtaaaaacacacgtaagattttacgtaacggcgaagtggcaccaccgaaagaagatccggtgccattacctgagctgccgtgcgaaaaaagtgatgcttatttcgtgctgcgtgacggtgctgccggtgtgttcctggctgccaacactttcccgaaaagccgtgaaacgcgtgcgccactggtggaagagctttatcgcttccgcgaccgtctgccggaaaaactgcgttatctggccgatgcgccacagcaggatccggaaggtaataagaccatggttcgctttagccgtaaaaccaaacagcaatatgtctctagcgaaaaagacggaaaggcgactggctggagtgcattttatgttgatggcaaatgggttgaaggaaaaaaataacctttaattctgtcaggtttttataaacaaagggtcgcgaaagcggcccttttttattgcatattattttttcttcacacctatacactaaggctataaatgatatagtggttatagttagcaccttttttattattaaatcgtattagtcacccgccaggtgtgacgaaaaaacgatgttctgatggcgtctaagtggatggtttaacatgaaattacaacaacttcgctatattgttgaggtggtcaatcataacctgaatgtcagtagtacagcggaaggactttacacaagtcaacccgggatcagtaaacaagtcagaatgctggaagacgagctaggcattcaaattttttcccgaagcggcaagcacctgacgcaggtaacgccagcagggcaagaaataattcgtatcgctcgcgaagtcctgagcaaagtcgatgccataaaaagcgttgccggagagcacacctggccggataaaggtagtctgtatatcgccaccacgcatacccaggcacgctacgcattaccaaacgtcatcaaaggctttattgagcgttatcctcgcgtttctttgcatatgcaccagggcagcccgacacaaattgctgatgccgtctctaaaggcaatgctgatttcgctatcgccacagaagcgctgcatctgtatgaagatttagtgatgttaccgtgctaccactggaatcgggctattgtagtcactccggatcacccgctggcaggcaaaaaagccattaccattgaagaactggcgcaatatccgttggtgacatataccttcggctttaccggacgtagtgaactggatactgcctttaatcgcgcagggttaacgccgcgtatcgttttcacggcaacggatgctgacgtcattaaaacttacgtccggttagggctgggggtaggggtcattgccagcatggcggtggatccggtcgccgatcccgaccttgtgcgtgttgatgctcacgatatcttcagccacagtacaaccaaaattggttttcgccgtagtactttcttgcgcagttatatgtatgatttcattcagcgttttgcaccgcatttaacgcgtgatgtcgttgatgcggctgtcgcattgcgctctaatgaagaaattgaggtcatgtttaaagatataaaactgccggaaaaataatttcttgcgttattttcggcaccttttatgtagcgaaggtgccggaatatattctcttttgttacttatttctataccgtgcacaatatttttatccctcatatttatagggtaaattacctgtaaagtagtgtctaattacccgcctcgcaaactccagttttcaaatatctatttcaggtcaaaagattgaattattcactggagacgattcgtaaattcgctggatttttgactaaagtttctttaggatttgtctcatcgtatgattaattacaccaatcgttcaacgtcttgctgataagtgatggcgattatatgaggttagcaatgccttctggaaatcaggaaccccgccgcgatcctgaattaaaacgtaaagcctggctggcggtttttcttggttctgcacttttctgggtggttgtcgcactgctgatttggaaagtgtggggataactatggtcggtcaggagcaactggagtcgtcaccattatgccagcatagtgacaatgaaacagaaacgaaacgggaatgttccgtcgttattccagacgactggcaactaacatcgcagcagcaagcctttatagaactgtttgctgaagatgatcagccgaaacaataattatcatcattcttattacccatttttaatgaattaaagggcttttaatacaccgcagcaataacagcttgagttatctcaacacaaaataataaccgttaagggtgtagcctatgatcaacacaaatatgaaatattggtcctggatgggcgcgttttctctgtcgatgctcttctgggccgaactcctctggatcattactcactgatccttgaccccgctgcggcggggttgtcatttgctttgccacaaggtttctcctcttttatcaatttgggttgttatcaaatcgttacgcgatgtttgtgttatctttaatattcaccctgaagagaatcagggcttcgcaaccctgtcattaaggaggagctatgagcagtaccctacgagaagccagtaaggacacgttgcaggccaaagataaaacttaccactactacagcctgccgcttgctgctaaaagtctgggcgatatcacccgtctacccaagagtctcaaagttttgctcgaaaacctgctgcgctggcaggatggtaacagcgttaccgaagaggatatccacgcgctggcaggatggctgaaaaatgcccatgctgaccgtgaaattgcctaccgcccggcaagggtgctgatgcaggactttaccggcgtacctgccgttgttgatctggcggcaatgcgcgaagcggttaaacgcctcggcggcgatactgcaaaggttaacccgctcagtccggtcgacctggtcattgaccacagcgtgaccgtcgatcgttttggtgatgatgaggcatttgaagaaaacgtacgcctggaaatggagcgcaaccacgaacgttatgtgttcctgaaatggggaaagcaagcgttcagtcggtttagcgtcgtgccgccaggcacaggcatttgccatcaggttaacctcgaatatctcggcaaagcagtgtggagtgaattgcaggacggtgaatggattgcttatccggatacactcgttggtactgacagccacaccaccatgatcaacggccttggcgtgctggggtggggcgttggtgggatcgaagcagaagccgcaatgttaggccagccggtttccatgcttatcccggatgtagtgggcttcaaacttaccggaaaattacgtgaaggtattaccgccacagacctggttctcactgttacccaaatgctgcgcaaacatggcgtggtggggaaattcgtcgaattttatggtgatggtctggatagtctaccgttggcggatcgcgccaccattgccaatatgagcccagaatatggtgccacctgtggcttcttcccaatcgatgctgtaaccctcgattacatgcgtttaagcgggcgcagcgaagatcaggtcgagttggtcgaaaaatatgccaaagcgcagggcatgtggcgtaacccgggcgatgaaccaatttttaccagtacgttagaactggatatgaatgacgttgaagcgagcctggcagggcctaaacgcccacaggatcgcgttgcactgcccgatgtaccaaaagcatttgccgccagtaacgaactggaagtgaatgccacgcataaagatcgccagccggtcgattatgttatgaacggacatcagtatcagttacctgatggcgctgtggtcattgctgcgataaccagctgcaccaacacctctaacccaagtgtgctgatggccgcaggcttgctggcgaaaaaagccgtaactctgggcctcaagcggcaaccatgggtcaaagcgagcctggcaccgggtagcaaagtcgtttctgattatctggcaaaagcgaaactgacaccgtatctcgacgaactggggtttaaccttgtgggatacggttgtaccacctgtattggtaactctgggccgctgcccgatcctatcgaaacggcaatcaaaaaaagcgatttaaccgtcggtgcggtgctgtccggcaaccgtaactttgaaggccgtatccatccgctggttaaaactaactggctggccagcccgccgctggtggttgcctatgcgctggcgggaaatatgaatatcaacctggcttctgagcctatcggccatgatcgcaaaggcgatccggtttatctgaaagatatctggccaagcgcacaagaaattgcccgtgcggtagaacaagtctccacagaaatgttccgcaaagagtacgcagaagtttttgaaggcacagcagagtggaagggaattaacgtcacacgatccgatacctacggttggcaggaggacagtacctatattcgcttaagccctttctttgatgaaatgcaggcaacaccagcaccagtggaagatattcacggtgcgcggatcctcgcaatgctgggggatagtgtcaccactgaccatatctctccggcgggcagtattaagcccgacagcccagcgggtcgatatctacaaggtcggggtgttgagcgaaaagactttaactcctacggtagccggcgtggtaaccatgaagtgatgatgcgcggcaccttcgccaatattcgcatccgtaatgaaatggtgcctggcgttgaaggggggatgacgcggcatttacctgacagcgacgtagtctctatttatgatgctgcgatgcgctataagcaggagcaaacgccgctggcggtgattgccgggaaagagtatggaagtggctccagtcgtgactgggcggcaaaaggtccgcgtctgcttggtattcgtgtggtgattgccgaaagctttgaacgaattcaccgtagcaatttaattggcatgggcatcctgccgctggaatttccgcaaggcgtaacgcgtaaaacgttagggctaaccggggaagagaagattgatattggcgatctgcaaaacctacaacccggcgcgacggttccggtgacgcttacgcgcgcggatggtagccaggaagtcgtaccctgccgttgtcgtatcgacaccgcgacggagttgacctactaccagaacgacggcattttgcattatgtcattcgtaatatgttgaagtaacaactatttgcttgccggttattttgcttccggcaagcaaatgaattacacaatgcaagagggttatttgttcagcaaatggcccattttctcggctttggtatcgagataatgttcgttattggggttacgacctacaatcaatggtacgcgttcaacaatattaatccctgcttcggtcagaatttcgacttttttcgggttattggttaacaagcggacttcattgacgccaaggagtttgaacatatcagcgcaaagagtgaagtcgcgctcatcagcggcgaagcctaactggtggttagcctctacggtatcgtaaccttgatcctgcagtgcgtaagcgcggattttattcagcagaccaatgttacgaccttcctgacggtgatacagcaaaataccacggccttcctcggcaatttgcgtcaatgccgcttcgagctggaagccacaatcgcagcgcaagctgaacagggcgtcaccggtcagacattcggaatggacgcgcgcaagtaccggggtatgcccggaaatatcgccatagactagcgcgacatgatcgtgtccggttgccagttcttcaaatcccaccatcaggaaatcgccccatggggttggcagtttggcttctgccacacgtttaagctgcatgaaattctccagataatgctggttctgtattggcttattttgccataacgagaaggggttcacctaatcacgacgcgtcgatcgttcacggaatggcacaaatctgtcaatttttcctggaactggcgttttcagttatgattgtgggacttatcaaaaaggagaggccatgcgtagcattgccagacgtaccgcagtgggagctgcactattgcttgtcatgccagtagccgtatggatttctggctggcgttggcaacctggagaacaaagttggctactaaaagcggctttttgggttactgaaactgtcacccagccctggggcgtcattacacatttgattttattcggctggtttctctggtgtctgcgttttcgcattaaggctgcctttgtattatttgccattctggcggccgcaatccttgtgggacaaggcgttaaatcctggatcaaagacaaagtccaggaaccacgaccttttgttatctggctggaaaaaacacatcatattccggttgatgagttctacactttaaagcgagcagaacgcggaaatctagtgaaagaacagttggctgaagagaaaaatatcccacaatatttgcgtagtcactggcagaaagagacggggtttgcctttccttccggtcacacgatgtttgctgccagttgggcactgctggccgttggtttgctgtggccgcgtcggcgaacgttaaccattgctatcttgctggtctgggcaacgggagtcatgggaagccgcctgctgctcgggatgcattggccacgcgatctggtagtagctacgttgattagctgggcgctggtggcggtggcaacgtggcttgcgcaacgaatttgtgggccattaacaccacctgcggaagaaaatcgcgaaatagcgcaacgagaacaagaaagttaacgctggttgattttccgaatttagcccttaaatcatcaacaatgcgtgtggatgccatttcgcagacggcgcgaaaatggtactttaaagggctattgcggtaagttgaccataatttattcgctctaaccacataacgggaagtaatgtgaaatatttactcattttcttactggtgttagcgatcttcgtgattagcgtcacgttgggtgcgcagaacgatcaacaggtgacgtttaattatctgttagcgcaaggggagtaccgtatttccacattgctggcggtattgtttgctgcggggtttgctatcggttggttgatttgtggcctgttctggctgcgagttcgtgtttccctggcgcgcgctgaacgtaaaataaagcgactggaaaaccagcttagtcccgcgactgacgtggctgtagtgccgcacagcagtgcggcgaaggaataactttctatgctggagttgttgtttctgcttttgcctgtagccgctgcctatggctggtatatgggccgcagaagtgcgcaacaaaacaagcaagatgaagccaaccgcttgagccgtgattacgtagcgggggttaacttcctgcttagtaatcaacaggataaagcggtagacctgtttctcgatatgcttaaagaggatacaggcaccgttgaagcccaccttacgctcggaaacctgttccgtagccgtggcgaagttgatcgcgctattcgcatccatcagaccctaatggaaagcgccagcctgacctatgaacagcgtctgttggcgattcaacaactggggcgtgattacatggccgccgggttatatgaccgcgcggaagacatgttcaatcagctgaccgatgaaactgacttccgcattggcgcgctgcaacagttgctacaaatctaccaggctaccagtgagtggcagaaagcaattgatgttgccgaacgcctggtgaagctgggtaaagataaacagcgcgtcgaaattgcccatttctactgtgagttagccctgcagcatatggccagcgacgatctcgatcgtgccatgaccttgctaaaaaaaggggcggcggcagataaaaacagcgcccgcgtatccataatgatgggacgcgtgtttatggcgaaaggagaatacgccaaagccgtcgaaagtctgcaacgcgtgatatcccaggacagagaactggtcagcgaaacgctggaaatgttgcaaacctgctatcagcagttgggtaaaactgccgaatgggcagaattcctgcagcgtgcggtggaagagaacaccggtgccgatgctgaattgatgcttgctgatatcatcgaagcgcgcgacggtagtgaggccgcacaggtctatattacgcgccagcttcagcgtcatccgaccatgcgtgtgttccataagttaatggattaccacttaaatgaagcggaagaagggcgtgccaaagagagcctgatggtgctgcgtgacatggttggcgagaaggtacgtagtaagcctcgttatcgttgccagaaatgtggttttaccgcatacaccctctactggcattgtccgtcttgtcgggcctggagtaccattaaaccgattcgcggtcttgatggcctgtaatttttaaaaaaaatccgactttagttacaacatactaattattaatgttccattgtgctccggcaacgacggcgcagaaaaagcctgccaggggagaaatcgcaactgttaattttttatttccacgggtagaatgctcgccgtttacctgtttcgcgccacttccggtgcccatcatcaagaaggtctggtcatgacgttaactgctagttcttcttcccgcgctgttacgaattctcctgtggttgttgcccttgattatcataatcgtgatgacgcgctggcctttgtcgacaagatcgacccacgcgattgtcgtctgaaggtcggcaaagagatgtttacattgtttgggccacagtttgtgcgcgaacttcaacagcgtggttttgatatctttcttgacctgaaattccacgatatccccaacactgcagcgcacgctgtcgctgctgcagctgacttaggcgtgtggatggtgaatgttcatgcctctggtggggcgcgtatgatgaccgcagcgcgtgaggcactggttccgtttggcaaagatgcaccgcttttgattgctgtgacagtgttgaccagcatggaagccagcgacctggtcgatcttggcatgacactgagtcctgcagattatgcagaacgtctggcggcactgacgcaaaaatgtggccttgatggtgtggtgtgttctgctcaggaagctgtgcgctttaaacaggtattcggtcaggagttcaaactggttacgccgggcattcgtccgcaggggagtgaagctggtgaccagcgccgcattatgacgccagaacaggcgttgagcgctggtgttgattatatggtgattggtcgcccggtaacgcaaagcgtagatccagcgcagacgctgaaagcgatcaacgcctctttacagcggagtgcatgatgagtgattccaacagccgtctggtctacagtacggaaaccggacgtattgatgagtccaaagcggcccctgtacgccctaaaggcgacggtgtggtgcgtattcagcgtcagaccagtggacgtaaaggtaagggcgtttgcctgattaccggtgtcgatctcgatgatgccgaactgacaaaacttgcagcggaactgaagaaaaaatgcggctgcggcggagcagttaaagatggagttattgaaatccagggcgataagcgtgatttattaaaaagtctacttgaagcgaaagggatgaaggtaaaactcgcaggcggttaacataaaaagccacggatatatccgtggctttcgaatattttactgtgcgtattattcagttatttcgtactgaacagaatcaagcgtattataattgcgagtcgataatcgacatttatttacgattatttaccgacctggtgaccaataacacctccgacagctgcaccacctaatgtacccaacgtactgccatcggtcagtactgcaccgcctaatgcccctgcacccgcgccgattgcggtgttgcggtcccgtttagaccagttagaacaggcactcagagacattgccaaagtaattgccagaacagccgcggtcatttttttgctcgttacaaacataatactctctcctgaatttatgattcacggaagtaagctctctataactataatagctaagaataagtctggtgaaattattccgtgaaatctgctcgcgcgcagggttatatcacgcaggtgataatgacttcctgttatatcgctgataataattttatatcttgagagtgttaataacaggtaaatagtcttaattatcaaccaggaatcatcttagagcggatgatttgccaaactgcaaatcatccgtagagaagggaaatggttaaatgtcaacgacgtgaatggtgagtttactgtgctcaagatgcatcagatcgctggcgcgtattttgctatcggtaatcacgcgattgaatcgctcaacgggaccgatggagtaactatgtacagcaccaaatttgctgctgtcagtcaggactatcgcttcgcactctttttccagcacggcattgaccacatcggtacgcatcatatcgcgaccggtaaatccagtttcaggttgccagccatcaataccaataaatgctttgctgaaatgcacctgttggatgcactggcgtgtcaaagggccaaccatactttcgctttttttctgatacacgccaccgagcaaaataacttcacaaggcgcgtctttcagcaaatgcgcgatgtagctgctgaccgtgatgatagtgacatttttcttctgctcgcccagagtccgggcgagtagggcattgctgctgccattttcgataaagatggtttcgcccggttgaaccaggctcgcggcaaactcggcgagttcacgcttcagcgtatagttgctcatcatacgggtttcgacgtcatcactatcaaggctaacagcaaagccatgtgcacggcggaggtaactcagtttttcgagtgtgttgagatcctggcgaatggtaacttcagaaactccagtggcttttgccagatcggttacgctaacctgaccctggtcaatgaccatctgtagaatagtttgttgtcgggaattcatcgctgtaattcttataacgttataatacttaataaaaaaatactgacgcgccgggcatcctcaaataggaaaacctgaaggcacgattgttaaatctcccacggtgccttcgggatgtctggcgtagattcagcaacctggcgcaagagttctgctttaagtatctcgagattatggatcgcagagtggtaatcgcctgccacaaggatatctaacacaatatcaatacgttcggcaacgcgctgggcatcaaattcagacatcaaggacatccttatagcaaaagggggaaaatgaataatgcaaaaattgccgctaaaagagaagtgtttaacagcaacggctaattatcatccaggaatacgatatataatgacgggatatagcgctaagtatatatattcatctacttatgcgcgcttcagatagcgtttataccagcgttcgaaggcgacggcgggcatcggtttggcaaacaaaaatccttgccgctcattgatcccgttcttggttaaaaaagcatcttcctttgcactctctacaccttcggcgatcacctgaagattcaatgcctgggccacagcgacgatcgcccggaccagactctggctgacaggttgtttgtgaatatctcgaacaaaaacctggtcaagtttgatggcatcgatcggaaagcgcgccagttggctaagactagagtagccggtaccaaaatcatccagatgcacttgcgcacctagttggctaaattgttgaataacagacagtgccagttcatcattctcaatcagacaactctctgtcagttcaacatctatagggcagtattcaaaattgagttcctggagaacctgtttcagggcggtgaaaatggtttgatcggcgagctgacgtgcagaaatatttaccgccactcgcaggtttatgcctttatcccgccactttgccacctggcgtacgacatcgagaatcacccaacggcctaaaggcacaattagcccactctcttcggcgtaggaaatgaagtccaacggtggaatcaacccacgttcaggactctgccaacgtactagtgcttccagactgcgcacttcgccacgccaggtgattttcggttgatagtgaataaccaactgatcgttttccagtgctttacgcaagttggtatccagccagagatattcaaatacccgttgattcatttctggggtaaaaacgcaaaattgtcctcgtccgccttccttcgctgtgtacattgctgtgtcggcgtgacgaataatagccgtgctgtcactaccatgttcgggagagagtgcaatacctacactacagctggtataaacttcaattaaaccaatgcgaaaggggagccgtaagcgggtcaaaattcgacttgccattgcttccagcgcgctttgactggtgttggatgccagtaccagaaactcatccccacctggacgagccaacacctggtcatgttcgagacagcttaaaatagccaaactcacgtcgcgtaataactggtcaccaaacaaatgcccataggcgtcgttgacctttttgaaattatccaaatcaagatacacaaccccaactttattgttatctgcatgattaatagcgtgatcgattaaatcctgcattgcgttacgattcggcagtccggtgatactgtcggtatttgccagaatacgcagtcgctcctgagcgcggcgctcttcggtaatgtcggtgccggaacagattaaaaaaatctcgtttttgccactgccgctgtggacaaatttattgcgaaacagaaacagccgctggcctttacatgttggtatccacagttcgacttcatatgcattgccgcttcgaaaaaatacacggttattgcgcctggatgccgcagcttcacgacggctcataaacagtttaaacacgctttgcccaatgacgtcgtgttctttcaaccctgtgtaatcttcacataaccgattgaagcgttggatattcccccggctgtcgagaatcactattgcggaatgtgcttcagaaactacctgctcagcaaaggaaagcccgtgacttaaatcacgagcaaccgccggtgtgtcatgccatgcagacgcgttgccagcccattcccgtttattgatttttcgtcctaccagatgcacagaaagatcgctttcatcgacggtcagactcatcatcaggctggaggtgatgaccgtcatttccctgatgcgagcagcctgttcggcagataactgcaatgtacgatcaggttctgtggtttcggtggtagaaaagcgcaaaacatcgctgctttccgtcaaccgccagtatggattgtggcttccgagaaagttgtacaacgttgtggactccctaacggttttcatgatgcatatcctccggttaacagcggagtccgcggttaaataaaaggaacaacatgacttacatgaaattaacggcggctaaacgcattgttttttttatatatttatttgtaatccagttttggaaaaacgccagttttcaaacgaaagtcagttaaaaaatctgcctggatataacgaaggtagagcggggaaataaacggcccatccatgaggaatgggccgtgaaaggagattacgcgaccgggcgcgcaataatgctgcgggtttccatgcggacttcggcaatagtgacgtcaataacgtcagtcactttgtaaaccgtttcacctttaatttgtacagtgccgttttcctggctgcaaaccagttcatcgcgcacagcgtgtaagaaaggtgccggaataaaggcgatagcgccgttatcaaccaaacgaacacgcatgccgccacggctgatatcgacaatttccgctgcgaaacgggtgtcggtcccggctttgtctttcaggaagcgtgcgtataaccagtcaccaacatcacgttctgccatccggttgagacggcgacgctcggccatttggacagtgatttcatcctgtgggcgcgtcgcagtttcgcctttgataaccgctttcagcagacggtggttgatcatgtcgccatatttacggatcgggctagtccaggtggcgtatgcttccagaccgaggccaaagtgaggaccgggttcagtgctaatttcagcaaaactctggaagcgacgaatgcggctgtcgaggaaaccagttggttgcgcgtccagttcacgacgcagtttgcagaaaccgtccagcgtgagcacttcttcggcatcgacatgcagaccgtgcgttttcagcaacgctgccagcgcgtcggcattcgccggatcaaagcccatatgcacgttatagatgccaaaaccgagcttatcgcgcagtacgcgggccgcacaaatgttagcggcaatcatcgcttcttcgacgatacggttggcaatgcgacgaggctcggcgacgatatccagcacttcacctttttcaccgagaataaagcggtaatccgggcgatctttaaacaccagtgcgtggttatgacgccactcgccgcggcgttggcaaatttgcgctagcaaacggacttgttcggcaattgcttcactttcaggctgccagtcaccggtattttccagccagtcagaaacctggtcatacaccagctttgctttggattcgatggtggcggcaaagaattcgatattatcttcaatggtgccatcagcggagagcgtcatgcggcatgccagtaccgggcggacttcattggcgcgcagactgcagagatcgtcagaaagctcgcgaggcagcatagggatgttgaagccaggcagatagttggtgaatgcgcgaattttcgcggctttgtccagcttgctgccttcagcaatccacgcggttggatcggcaatcgccacaatcagctgaagtttgtcatccggcaacgccttagcgaaaagggcgtcatccatatcttctgtgctggcactgtcgatggtgacaaaatccagcgcggtcagatcttcacgaaccagaccttcatcgagcatttcggtagcgacgccgtctggtgcttctttttccagattatggcgtgcaagggtaacccaccacggtacaaagtgatcgtcaccaaaagtgatgtattgtgtcagttctgcatagaaagaacgatcgcctttcagcggatgacggcgcatttcggcaaccgcccagtcgccttctttaaactcgtggttcaggccacgggctgcgcggcaaggaatggcgtcttttaagagtggatgatcaggaacgatggccagacggtcatttttgccctgaaccttacccacgaaacgagtcaggaacggttcaaccagttcttctggctctgcggattcacgttctttttcactgtggatcaccgcgataattcggtcgccatgcatgacttttttcatctgcggcggcggaatgaaataacttttttgcgcgtcgacttccaggaagccaaagcctttttctgtggcttttaccaccccttcagcgcgtggcgtctgggaatgcagttgctgtttaagctgcgctagcagcgggttgtcctgaaacataattgtctattttggtggccattagagcggctgacagttttacgcgaatctgtctgacgcggcaaggttaatatgtctcacccaacgcgatttttaagcgatttatccagccacacagcccgctccataccagcagattaataatctgcgtactacttttttcgtgttcgagtaaagggctgaactgggcggcgctaaagcgatcgggtgctcgggtcagccattgtatcgcctgaacggtagcgcgctcaacagaatgacggtcagcccattggttaatttcattttcgcccttgcgcataagggtgctgatttttttatattcattactactatccatacaggtggcaaaacaagcaggactgccatttatacgcgcgcataacaacgccgcaagctgattatccggctgtgtattgccccgtgtgctgtttaacaacttttcgagaagggaaagactaatagggtggagagagagtatttcggccagttggcaaagttctgcagtactactttttgtgtgctcttcaggtagtttttccacctcatagctgcttcgccagcgtaaactttcatcagcaaacagactcgcgtcggcgtagttttgtatctccagcccgggtaaccagcgtaccggatgcccgagataagcctgaaatgtcgcaattgtccgcgcctgaaagccaataaaaccaatgatttggctaatgatcacacagtcccaggcagtaagaccgacgtcattcagatgctggcggcttcggttgtcgataatagaagggctgctagccagttggcgggcatattgcgtgatttgtgccaaccgatgattactttccctggtggaatcaggcccggggagcggcgtaagtcgcgcgctatagtagttacataaccgctggacgccgcaaacctgagcaaccgtcagggccgtgctcaagcgttcataagcggtgaaggtctgactacgggtcacggtaagctggtcagggaacaaatccactgcaagaacacgcgcagggtccagccaactaaggaagggggccagcgtttctttttcaaggatcacgtcgagtagaaagggatcgctgacctttgcggcttccgggaccagaggcagaacgtcatactccgtagtactggattgcgtttcatgataccagtggcttttgccggtgatgtggcgttgttccatgggcgctccttggtcgtaaaggaaatcgttatcctgacgcaaggcgggaaggggagaaagacggatcggcgataacaaatatcagaaaggtataacagagataacgggcggcagaacgccgcccatctttaccaacagaacgattatttcagttcgagttcgttcattgcagcaatgctgaaaccgccgtcaacgtggaccacttcaccggagataccggcagagagatcggagcacaggaatgccgcagagttacccacatcttcaatagtaacggtacggcgaatcggggtaacggcttcgcaatgagccagcattttgcggaagtctttgataccggaggccgccagagtacggatcggaccagcagagatggcgttaacacgcacaccttccggacccatcgcgttcgccatatagcgcacgttcgcttccagagacgcttttgccagacccataacgttgtagttcgggatagcgcgctcagcgccaaggtaggaaagggtcagcagggcagaacccggattcagcatggagcggcaagcttttgccattgcaacgaagctgtaggagctgatgtcgtgggcaattttgaagccttcacgggtaacggcgttaacatagtcaccatccagctgatcgccaggtgcaaaaccaatagagtgtacgaaaccgtcaaatttcggccaaactttccccagttcagcgaacatggtgtcgatgctggcatcttctgcaacatcgcactgcagaacgatgtcagaacccaattgagcggcaaattcttctacgcggcctttcagtttgtcgttctggtaggtgaatgccagttcagctccttcgcggtgcatcgcctgagcgataccgtaggcgatggatagtttgctggcaacaccggttaccagaatgcgcttaccggaaagaaaacccatagctttaatccttattgttgatgcttgttgtgcctgaaaatcaggcgattcgtcgttttagtaaacagtacgaacagataaacggttattataatcaacctggctgtgagtagctatagttgccaggtccgaccggagcaggctgcggcagggggggcgcttttcccctcaccctaaccctctccccagaggggcgaggggaccgtattgtgcaaatattgttaccccagcaacaaacaggctcatacagcccctaaccctttcatggcgatggctgggacggttcagaccttgccgaatattctccagcaccgtctccatgttttcaccacaacagctattcggctcggtctgccccctcgctctttcagggagagggactccggcggttcagttcctgcagaatattctccagcaccgtctcctcattacaatcaatctcgttattccagaaacgcagcacggtccagccctggctctcaagccagctagtgcgcctggaatcataggcaactgctaaatcatgctgcccaccatccagctcaacgactacacgcgcgctgcagcaagcaaaatcgagaatgtagctccccactggatgttgacggcgaaatttgaaatcactaaaacgtcggctgcgaagatatcgccagagctttcgttcctgcaaagtgagattgcgtcttaaatcacgcgcattacttttaattttatctatcacctcattctgacaagatttaatcttttgtcagaatgaggtgaataatctggaaggaggattcagaaaattagcgatctttacgccacgcatccgccgtcaatgcctcgccaaaatgaccggcaatcagccgtttggtgagttcatgcagcgggcttgccagcacatccgcggtgctgcctcgctcgacaacctcgccctgatgcatcaccagcacctggtcgctaatgtgcttcatcattccgatatgctgggtaacataaatatagctaatgccctgtttttcctgtaattccagcatcagattaatcaactggctacgcatgctcatatccagactagcgagggcttcatcggcaataatgacttttgggcgcaatatcagcgcgcgcgccagacccagacgctgtttttgtccgggtgccaacatatgcggatagtaactgacgtgatccggtagcagcccaaccatacgcatcgtttcaataatctgtttgcgacgctgttccggttccaggtcggtgttcaggcgcagtggaaaatccagaatttggctgatacgttgacggggattcaagctggtgctaggatcctgaaaaatcatgcgaatacgctgactgcggaaggaataatcgccaaaatgcagtggatgatcgtcaatcaataactcgccgctggtaggctctatcattcccgccagcatttttgccagcgtggatttaccgctaccattctcgccaataatcgccagtgtctggccttcacgtagcgtaaagctcaagggttttaccgcttctacggtctgacgacgaaaccagccggtccggtagcggaacgttttacttaaattacgcacttcaagcagcgtttcgatcatctcactctttctccatgttcagcgggaaatgacaggcatagagatgatttttcgcccccgtcaaacgtggcgtcacaatgcattctcgttgtgcatacgggcaacgtggccccagacgacaaccaatcggtaactgttccagcagtgggatagcgccgggcagcgtattgaggcgacttttatgcggcatcgcgctgccgaagtctggtatcgcgcggatcagcgcctgggtataaggatgatgtggcatcgtcaccaactccttactcggcgcggtttccactgtttgaccgcagtaaagcacgttaattttatccgcccattggctaagcatttgtaagtcatggctgataagcaaaatagtggtattgctgttttggttgagacgcgtcagcaggcgaaagatttgcgcctgggttgttggctccatactgttggtcggttcgtcagcaatcagcagacgcggttgattcgccagtgcaatggctatcatcactttctgacattcaccttcggtcaactcatagggaaaactgcgcatcgcatctttgtgatctttaatccccacgcggtgcagcagttcaatggcacggcgtttgcgccagccaaaacgctgccaccaacggcctttataggtccaggctgggatgttttgcatcaactggcggcccacacgttcactagggtcaagacagctctgcggttcctggaaaatcatgctcacgttatggccaaccagtttgcgccgttcgcgtgcggagagacgcagcaaatcgatatcatcaaaacgcatacggtcagcagtaacacgccagttatctttattcaccccacaaatcgctttcgcaatcaaactcttgccggaaccggattcaccaacaagaccgcggatttcaccttcggttaaggtcatacttacccggtcgacggctttaacccactcatcaccggttttaaattcaatggtcaggttacgaatatcgagtaatggcattattccacccccgcaataatcgcacgacgaacgccatcgccaaggaggttaaccaacaacacgctaatcataattgccgcacctggcagcatgacagtccacggggcgacataaatcagttccagcgcatcaccgagcatcgctccccattcagggctggggagttgtgcgccgagatcgagaaagcccagcgcggcgatatcgagaattgccatgctcagtgcgcgggtgatctcggtgaccagcccggcggtgatgtttggcatcacagcaaaccagagaatattcagcgtacttgcgccatccagacgggcggcgataacgtactctttttccagttcgtcatgcaccatgctgtaaatgctacgtaccatacgcggcagcaatgccagccagacagcaaacatagcgtgggacaaactcggtccggcaaacgctacaacgataattgccaacagcaggctagggatcgccagtaaggtatccagaatatggttaagcaccgcactgcggaggccgtgtgtcgccccggcgaaggtgcccagtaccaggccacagatcgtcgcggcaagcgtcaccacaaatgcgccacccacggttggcgcagctccgctcagtaaacggcttaaaacatcgcgtccgaggtcgtcagtccccaggaagaaagaaacttcgccatagcggctccaactcggcggcaataattgataaccgagaaattgctggtcgatgccgtaaggcgcaaaccagccgccaaaaatacacagtacagccagccccgcgcagccgtacaggccgaccatcgcagaggcgtcactataaaatttgcgccaggcggtacgcagcgtgcccggcgggcgcttttcgctgtatacgctatcgtaaggcataccattccttatgtttcagattatttatcgtaaggcataccattccttatgtttcagagggttagccatggcacccaaaatatcagaaatcacgttaacaataatgaccagactgccacacaccatcactccggcggaaatggctgcgtaatcctgctggcggatggcgttaattaaccagcgccctaaacccggccagctaaaaaccatttcggtgatcatcgccagcgtcagcatggtggaaaactgtaagcccaggcgaggaataaccggcggtaacgcgttatgcagaacgtggcgacgcaaaatagtaaagcggctcaaaccgcgggtcgccgccgcttttacatagttctggtcatacacttcgatagtgctgatacgcatcaggcggatcacttcagttgttggcgcaacgctcagggtgatcacgggcaatatcatatggcggattgcgctcatgatcatttcatcccgccatggactgtcgctaagccaggcatcaatcaacgcaaaaccggtaatcggtttcacttcgtagagcagatcgaaacgcccactaacgggcaaccaacctagcgtgagactacaaaacagcgtcaacagaagcgccagccagaacaccgggatactaaagcccagtaaggcgatggcgttgatcaagttatcctgccacttatggcgcgtaatcccggcaatcatccccacggggatgccaacaatcagcgcaaaaccgaaggcgaggatgcacagttccatcgtcgccgggaagacctcttttaactgttcggcaatcggttgaccgttaatgctggaaacaccaaaatcccagtggatcaggccgttaaaccagaacacccaggcattccacagactcgcgccttgtaacggcgcatgaggggtgaaatagctcaagctgaagccaacgaaggtcagcaggaacaaggtgacaatcaataacaaaatgcggcgtaaggtgaagataatcatggttttttcacctcatcctgtttctcgcgatacaccccagcaaaggaggcgttaccaaacgggctaagtaccagacctttgatatcgtaccgataggcctgcaaacgcaaactgctcgccagcggcaaaatgggcaattcctgcgccagaatactctgcgcttcgtcataggcttcaatacgcgccgccagctgctggctagagagcgccttacgcaatacgctgtcgaatttcggatcgcaccagtgggcgaggttggtctggctatgaattgccgcgcagctcagtaacggacggaagaaactgtccgggtcgttactgtccgtcgcccaaccggataacgtcagatcatggctcatatccatcaaccgcgcctcctgaaagcgaccttctaccggcacaatcaccacttttacgccaacctgcgccatatccgcctgaatcagttcggcagttttcagtggactggggttccacgcctggctacgtgtgggcacccacagtttcagcgttaaattttccagccccaagctcttcaactgttcgcggcttttcgccggattgtattcagtaattttagcctcgttgtcataggcccagctggcgcgcggtaaaatagaggccgccgtttcagccgtaccataatagatggattgcatcaggcgctggttattaatcgccagtgccagcgcatggcggacagcgggattatttagcggcggtttggcggtgttaaatgccagataggcgacgttcatcccaggacgcagcgttaaacgcaagcgcgggtcgtcacgcaaaatggatagctggctggcagcaggccaggccagaacgtcgcattccccggtcaggagtttgctcagacgtccggtgccgccggagcctaaatccaccactacctgcggcattaacggtttaccgcgccagaagtcatcatgacgttgtaggcgaataaattgcccggcgcggtattcgctcaactgatacggaccggtgccgaccggttgacggtcgagttgctcctggcgatcttctttctctaacttccgggcatattctgcgctcatgacgctagcataatgggttgcgaggtgccacaaaaaagaagcatccggctgggcgagtcggaactcaacggtatgattatccagtttgcggacgcttttcacgttatcggcaaattgcaggctgtcgaagtaggggaagttgctgccgttgacgttatgccacgggttgttgcggtcaaaaattcgctggaaggtaaacaccacatcgtcggcattcattttacgagtgggagtaaaccagtcggttttttgaaacggaacatcgcgacgcaggtggaagcgataggtcgcgccgttgtcgagtacttcccagctttcggcaagttccggcatcaggcgataggtatagggatcgacatccagcagtcgatcataaaactgggcggcaagggtatcgacaattaacccactgctcgctttggatgggttaaaggtgttgacttgcccgctgacgcaatagacaaaaccgctgtcgcggatatcagcatgcgggggagattcaggcgcggcgattgcctgaccactcacaagtccagcaatcaccaaaagagagcttaatacctggcgcataatattaagggattttatgtaaagaggctatcttactaatatttaatgacatttgccattaccgtttgtgttcaggggtcgtaatgagggccgtgtggttggtcgttgaacaggtgacgtcgccatctgttcaacattcgtacccgtgatttctctataactataactcacagaacaacttagcgaggagcagagcggtacgatcgtgagaaacccattaaagcacgctgcagtgcgtgtcattgttagccagatgcggcgtgaacgctttatccggacaacgatactgaccgatcgtctgcaattaaatcattactcattaccccattgattcaaaaactctgcgatctcatcaatgcgtacgggattaatccccgcttcagcagccatttcatgttgggcttcttcgctgatctcttcattgttcatcaaacgggtgagcagtaactggaagtagtgggccagcggtgtgcgttcagcctctgcgacaggctctgcgcattcggtcgcgtactcatcggcaatatcaaaatattttagcgggatatcgtggttcattatttgcccctggggttaatgcgctaagcataagggcggatgatagcactcgtgatccgggtcatacatctttttatagttaatggcgcggcgcgttaccctcaggcaggataatgcgccgcgcatccgactattacgtttcactcaccggcgttctgtcaccatcatacaacggcactttgcgatagcggcggatcagataccataaatatgcgccgcctaagctagcccataccagaccgagtgtcagactcgtactctcgaggttaacccacagcacacccaccgtcagcgcgccaaccagcggcatcagcaaatagtggaagtgatccttccagcttttattcattcctttacgccgccagaaatgattaaacacgctcagattcacgaaggtaaacgccaccagagcaccgaagttaattaacgctgtggcggtaactaaatcgaagaacagcgcgctcaacgcgacaatcccgaccataatgacgttgagtgccggagtccgccattttgggtgcacatagccaaacacgcgctccggaaacacattgtcacgccccatcacatacagcagacggctcacgctggcatgactagccaggccagaggctaacgtgttcacaaacgtggtgcagaggaaaatgctctggaagagcttgccgccgacgtacagcgcaatttcaggcagtgcggcatccggatctttaaagcggctgatatcgggaaagaacagctgcataaagaagctcgccgcgataaagataacgccaccgtagaccgccgtcaggaagatggctttcgggatcacgcgtgcggcgtccggcgtctcttcgctaagcgtggtcaccgcatcgaaaccgaggaaggagaaacagacaatcgtcgccccggtaataatcgggatcaggtgcgcgttctcgctgataaacggctgaagactccagacggtgccaacgccttctcctttatgcagtccctgaactaccaggaagataaacaccaccatgatggagatttgcaccagtacaaacagggtattgaagttagcgaccaggttgacgctcttcagattcgcggcggttaaaatggcgacgaaggttaccacccacacccacggcggcacttccgggaagagggcggagagatagattttcgccaacaagacgttaatcatcggcaaaaagagataatccagcaggctactccagccgaccataaatccgacgtgcgggttaatgctcttttgcgcgtaggtataggcgctaccggcctccggaaactggcgaaccagtttgccgtagctgatagcggtaaacagcacacccgccagcgccagcaaataggacgccggaacgtgaccgtcgctaatgccggagacaataccaaaagtatcaaatacggtcatcggcgtgagataggccagacccatcatcaccacctgccacaatttcagactttttcgcagacgggttttgccgggttgcgcagcaatattcagtggactattaatagccataattgctgcctcccctgcgtaataaggtttgcggtcgtgtcgacctgaaatcaaacctgtttagcaagggaagcaaagggggcggagtccagtcagtagcaggaggggcgcatacgcagcctccctcgccatgcggggatttaatcatcggcatcatctcatttcctcgtcacagtcttaatcgttaacggaagcccgttgccgcccgcgctccataacgcgacatccgggaaatgtctggattaccagcaaatgtcaggcctggctccgctcaggccgatgaaacaaccccgcaaggggtattacgcgtttttcaacatccactcaatttctgtttctgtgatgaggcgctcaaactgcaacagctcatcatttttacaggcgtgatagacatggcagaagcgttcgcctaaatagcggcgcaggtgatcattctcgataaactcacccagggcatcgctctggcgaatcggaaagggtaagccttcctgttccagcccgttgccttcgacttcttcctgcaacggcagctcgttatcaaggccatgcaaaataccggcaaaaatcgctgccatcaccagatatgggttggcatcggcacccgccacgcgatattccacgcggtgattatgacggtcgccgcacggaatacgcagggcgacggtgcggttgttatggccccagctcgcctgcgtcggcacatacattcccggctggaagcggcgatagctgttcacgtttggtgccagcaacgccatgctgctcggcatcaggtcaatcatcccggcgagcatctttttcagcagcgggctatcttcgccttccgcgtcagaaagcacgttctcgccacgattattttgcatactgatatggatatgcattccgctgcccgcgtgctcttcatacggcttcgccataaaagtggcgtgcatcttatgcttttctgccatcagacgcaccaggcgttttagtgccagcgcatcatcgcaggcttccagcacgttatcagtatggtaaaggttgatttcaaactgacccgggctggcctcagcgaccgcgccatctgccggaatcagctgtaactgcgccagttcatcaatatcattgagcacgtcggcgaagtggttgaggttatcaacggagtaaacctggctttgtgtattgcggtcatcggtgccaggcgcgcagggcggttgcagatacccttcagcgtcgcgctggcgatccagtaaatagaactccagctctaccgctacgaccgggaacaatccgcgctggcgcagctgctgccacaggcggttaagaacgttccgcggctcaacgtcaaagggagcgccatcttcatcgaccatggtcaggagcatctgaccgataaactctggatcggcggcagaaggagttaaggaaccgagaacaggaacacaggtacgatccggctcgcccatttcctgacccagacctgcttcttctactacgttgcccagaatatccattgcaaatacgctggccgggaaataacaccctttctcgagcttcttcaggctactaacaggaatacgctttccacggaagcaaccatttaaatcggtaagtaaaacatcaacatattgcgtattcgggtagcgctccaggtagcgtttcacttcctgcgtaaaggcgctaccccgcctctcttcactctgctgaacaaagttctctacttcaacgatattggtttccatgattcttcgcctttggtttgttttccgctcgttatcaaagcgtaaaatataatgaccaccattcgaatctgtatgcaaactaaatgtttgtcaaatgttaaattgagtttgcaaaaatgaaaacccactgctagattgaaaaaatattgaacataaaggtcatttaaagcgcagtaatggcgataatttagtccactttgtgagattgagcatggaaaatataatgaacaatccggttatcggtgtcgtaatgtgcaggaacaggcttaagggtcatgcgacccagactctgcaagaaaagtacctgaatgccatcatccatgcaggcggcttgcctattgcgctaccacatgcgctggcggaaccgagtttacttgaacaacttttgccgaaactcgatggcatttatcttcctggtagtcccagcaatgtgcagccgcacctatatggtgaaaacggcgatgagcctgacgccgatcccgggcgtgatcttctgagcatggcgataattaatgccgcactcgaaaggcgcatccccattttcgccatctgccggggtttacaagaactggtggtggcaaccggtggtagcttgcatcgcaagctgtgcgaacagcctgaattgctggaacatcgggaagatcccgaactgccggtggaacagcaatatgcaccgagccatgaagttcaggttgaagaggggggattactgtctgcgttgttacctgaatgtagcaacttttgggtaaactctctacatggacaaggggcgaaggtcgttagcccacggttgcgtgttgaagctcgcagcccggatggcttagttgaggcggttagcgtcatcaatcatccttttgcgctgggcgtacagtggcacccggaatggaacagtagcgagtacgcgcttagccgtatattgttcgagggctttatcaccgcttgtcagcaccatatcgctgaaaaacagcgactctgaccactacagtttaaggaaatgcaaatatgagtgatgagggactggcgccaggaaaacgcttgagcgaaatccgccagcagcaggggcttagtcaacgtcgtgccgccgaactctccgggctgactcacagtgctatcagtacgatagaacaagataaagtcagccctgccatcagtacgctgcaaaagctgctgaaggtgtatggtctgagtctcagcgaattcttttccgagccggaaaaacctgatgagccgcaggtcgtcattaatcaggacgacttaattgagatgggtagtcagggtgtgagtatgaagctggttcataacggtaacccgaatcgcacgctggcgatgatctttgaaacgtaccagccgggcacaaccactggggaaagaattaagcatcagggtgaggaaataggcactgtactggaaggtgaaattgttctgacgattaatggtcaggattaccacctcgtcgcggggcaaagttatgccattaataccggcatcccgcacagtttcagtaatacgagcgcaggtatttgccgaattatcagcgcccatacgcccaccacgttttaatctttttgttctgtaagccgggtaagcgcaatgcgcccggcaatctatacacaaaatcattcaagttgcatcaaggcggcaagtgagcgaatcccgatgagcttactcaggtaagtgattcgggggagcgaacgcagccaaggcagaggcggcttgaaggatgaagtgtatataaagaatgtcgccagaaataaacgggcatacggcccggggatctctgcgccctgacgttcacaaactgcatatatctgatagacgtgaaacaggagtcataatgaattttcatcatctggcttactggcaggataaagcgttaagtctcgccattgaaaaccgcttatttattaacggtgaatatactgctgcggcggaaaatgaaacctttgaaaccgttgatccggtcacccaggcaccgctggcgaaaattgcccgcggcaagagcgtcgatatcgaccgtgcgatgagcgcagcacgcggcgtatttgaacgcggcgactggagtctctcttctccggctaaacgtaaagcggtactgaataaactcgccgatttaatggaagcccacgccgaagagctggcactgctggaaactctcgacaccggcaaaccgattcgtcacagtctgcgtgatgatattcccggcgcggcgcgcgccattcgctggtacgccgaagcgatcgacaaagtgtatggcgaagtggcgaccaccagtagccatgagctggcgatgatcgtgcgtgaaccggtcggcgtgattgccgccatcgtgccgtggaacttcccgctgttgctgacttgctggaaactcggcccggcgctggcggcgggaaacagcgtgattctaaaaccgtctgaaaaaagtccgctcagtgcgattcgtctcgcggggctggcgaaagaagcaggcttgccggatggtgtgttgaacgtggtgacgggttttggtcatgaagccgggcaggcgctgagccgtcataacgatatcgacgccattgcctttaccggtagtacccgtaccgggaaacagctgctgaaagatgcgggcgacagcaacatgaaacgcgtctggctggaagcgggcggcaaaagcgccaacatcgttttcgctgactgcccggatttgcaacaggcggcaagcgccaccgcagcaggcattttctacaaccagggacaggtgtgcatcgccggaacgcgcctgttgctggaagagagcatcgccgatgaattcttagccctgttaaaacagcaggcgcaaaactggcagccgggccatccacttgatcccgcaaccaccatgggcaccttaatcgactgcgcccacgccgacagcgtccatagctttattcgggaaggcgaaagcaaagggcaactgttgttggatggccgtaacgccgggctggctgccgccatcggcccgaccatctttgtggatgtggacccgaatgcgtccttaagtcgcgaagagattttcggtccggtgctggtggtcacgcgtttcacaagtgaagaacaggcgctacagcttgccaacgacagccagtacggccttggcgcggcggtatggacgcgcgacctctcccgcgcgcaccgcatgagccgacgcctgaaagccggttccgtcttcgtcaataactacaacgacggcgatatgaccgtgccgtttggcggctataagcagagcggcaacggtcgcgacaaatccctgcatgcccttgaaaaattcactgaactgaaaaccatctggataagcctggaggcctgaaatgaccgaacataccagcagttactacgccgccagtgcgaataaatatgcaccattcgacacgctgaatgagagtatcacctgcgacgtttgcgtggttggcggcggctataccgggctctcctccgcgctgcatctggcggaagcgggctttgacgtagtggttctcgaagccagtcgcatcggctttggcgcaagcgggcgcaatggcggacagcttgtgaactcctacagccgcgacatcgacgtgatcgaaaaaagctacggcatggacaccgcccgtatgctcggcagcatgatgttcgaaggtggtgagatcatccgcgaacgtatcaaacgttatcagattgactgcgactaccgccccggcggcctgtttgtggcgatgaatgataaacagctcgccacacttgaagagcagaaagagaactgggaacgctacggcaataaacagctggaattgctggacgccaacgccattcgccgtgaagtagccagcgatcgctataccggtgcgctgctggatcacagcggtgggcatattcatccgctaaaccttgccattggcgaagcggacgccatccgcctcaacggcgggcgcgtgtatgaactttctgccgtgacgcagatccagcacaccacgccagccgttgtgcgaactgccaaaggtcaggtgacggcgaagtatgtgattgtcgccgggaatgcgtatctgggcgataaagtagagccggaactggcgaaacgcagcatgccgtgcggcacgcaggtgatcaccaccgaacggctgagcgaagatttagcccgtagcctgatcccgaaaaactactgtgtggaagactgtaactatctgcttgattactaccgtcttaccgccgacaaccgcctgctgtacggcggcggcgtggtctacggcgcgcgcgacccggatgacgttgagcgccttgtggtgccgaaactgctgaaaaccttcccgcagctgaagggcgtgaaaattgattaccgctggacgggcaacttcctgctgaccctgagccgtatgccgcagtttggtcgcctcgataccaacatctattacatgcagggctacagcggccacggcgtgacctgtactcatctagccggacgtttgattgccgaactgctgcgcggcgacgccgaacgtttcgatgccttcgccaatctgccgcattacccgttccccggcgggcgcacgctgcgtgtgccgtttaccgcgatgggcgcggcgtattacagcctgcgcgatcgtctgggcgtttaatttccgattaaccgtgaagagtcaaaaggtgtgaaacatgagcaacaatgaattccatcagcgtcgtctttctgccactccgcgcggggttggcgtgatgtgtaacttcttcgcccagagcgctgaaaacgccacgctgaaggatgttgagggcaacgagtacatcgatttcgccgcaggcattgcggtgctgaataccggacatcgccaccctgatctggtcgcggcggtggagcagcaactgcaacagtttacccacaccgcgtatcagattgtgccgtatgaaagctacgtcaccctggcggagaaaatcaacgcccttgccccggtgagcgggcaggccaaaaccgcgttcttcaccaccggtgcggaagcggtggaaaacgcggtgaaaattgctcgcgcccataccggacgccctggcgtgattgcgtttagcggcggctttcacggtcgtacgtatatgaccatggcgctgaccggaaaagttgcgccgtacaaaatcggcttcggcccgttccctggtagcgtgtatcacgtaccttatccgagtgatttacacggcattagtacacaggactccctcgacgccatcgaacgcttgtttaaaagtgacatcgaagcgaagcaggtggcggcgattattttcgaaccggtgcagggcgagggcggtttcaacgttgcgccaaaagagctggttgccgctattcgccgcctgtgcgacgagcacggtattgtgatgattgctgatgaagtgcaaagcggctttgcgcgtaccggtaagctgtttgccatggatcattacgccgataagccggatttaatgacgatggcgaaaagcctcgcgggcgggatgccgcttagcggcgtggtcggtaacgcgaatattatggacgcacccgcgccgggcgggcttggcggcacctacgccggtaacccgctggcggtggctgccgcgcacgcggtgctcaacattatcgacaaagaaagtctctgcgaacgcgcgaatcaactgggccagcgtctcaaaaacacgttgattgatgccaaagaaagcgttccggccattgctgcggtacgcggcctggggagcatgattgcggtagagtttaacgatccgcaaacgggcgagccgagtgcggcgattgcacagaaaatccagcaacgcgcgctggcgcaggggctgctcctgctgacctgtggcgcatacggcaacgtgattcgcttcctgtatccgctgaccatcccggatgcgcaattcgatgcggcaatgaaaattttgcaggatgcgctgagcgattaatagcccaacgcaataatgtctgatgcgctgcgcttatcaggcctgcaaacgacgtattgattatgtatgccgaataaagcattcacgccgcatccggcaagttgtattgctcaacttcgttaaatctggtgctttttcaacaacgcgcggaactgatgataagttaaccccagtaattcagccgcgcgcttctggttatatttcccttgttgcaaactgagttgcagcaactctttttcctgctgcatctgaaactcacgtaaatccagcggcagtgttggaaggctggtggtttcactaacggcgatagcgtcttcaggcggacgccgtttaaagggatcaataatgatgtcatcaagcggataatcgctggtgccgtggcgatacacactacgttccaccacgtttttcaattcacgaatatttcccggccaacgataattcagcaatgtttctctggcgcgctccgtaaaccccgggaacagaggcagcttgatttcccgacacatctggatggcaaagtattctgccatcaacattatgtcgctttcgcgctcgcgcagtggtggcagttgtacaacatcaaaagccagtcggtcgagcaggtcagcgcgaaaagtgccttcattgaccatcgccgggagatcggcattcgtcgcgcataccaaccgcacattcacctgcaatggttggctgccgccaacgcgctccagttcaccgtactcaatcacgcgcaataatttctcctgcaccatcatcggtgccgtagcgagttcatcaagaaatagcgtaccgccgtcggcacgttcaaatctccctggatgacgtttttgcgcaccggtaaacgcccccgcttcgtgaccaaacagttcggaatccagcagattttcatttaacgccgcgcagttaagggaaataaacggcccttgccaacgggaggagagataatgcaggcggctggcaatcagctctttaccggtgccgcgttcgccgatgatgagcaccggtttgtccagcggtgcgagatggctaacctgttccagcacttcgagaaagctgttcgcctcaccaagtaaattatctttgtattctgccatgatgaaattcgccacttgttagtgtaattcgctaactcatcctggcatgttgctgttgattcttcaatcagatctttataaatcaaaaagataaaaaattggcacgcaaattgtattaacagttcagcaggacaatcctgaacgcagaaatcaagaggacaacattatgggtattttttctcgctttgccgacatcgtgaatgccaacatcaacgctctgttagagaaagcggaagatccacagaaactggttcgtctgatgatccaggagatggaagatacactggttgaagtacgttctactagcgcgcgcgcgttggcagaaaagaaacagctgactcgccgtattgaacaagcgagcgcgcgtgaggttgaatggcaggaaaaagccgaactggcgctgctgaaagagagagaggatctggcacgtgcagcgttaattgaaaaacagaaactgaccgatctgattaagtccctggaacatgaagtgacgctggtggacgatacgctggcacgcatgaagaaagagattggcgagctggaaaacaaattgagcgaaacacgcgctcgccagcaggcattgatgttacgtcatcaggcggcaaacagcagccgcgatgtgcgtcgtcagctggacagtggcaaactggatgaagcaatggctcgtttcgaatctttcgaacgtcgtattgaccagatggaagcggaagcagaaagccacagcttcggtaaacaaaaaagcctggacgatcagtttgccgaactgaaagccgatgatgcaatcagcgaacaactggcacaattaaaagccaaaatgaagcaagacaatcaataataacatccaggcggcgtccgaacgcgccgccgctcatcgtctaaggagtacttatgagcgcgctatttctggctattccgttaaccatttttgtgctgtttgttttaccgatctggttatggctgcattacagcaatcgttctggtcgcagtgaattgagccaaagtgagcagcagcgattagcgcaactggctgatgaagcaaaacggatgcgcgaacgtattcaggcgctggaatctattcttgatgcagaacatccgaactggagggatcgctaatggcgggcattaatctcaataaaaaattatggcgtattccacagcagggcatggtccgcggcgtctgcgccgggattgccaactattttgatgtaccggtaaaactggtgcgtatcctggtggtgctgagcattttcttcggtctggcgctgtttaccctggttgcttacatcattttgagttttgcgcttgatccaatgccggacaacatggcctttggtgagcagctaccttccagcagcgaattgctggatgaagtcgaccgtgaactggcggcaagtgaaacgcgtttacgcgagatggaacgttatgtcacttccgatactttcacgttacgtagccgtttccgtcaactgtgaggaaagttatgaatactcgctggcaacaggccgggcaaaaggtaaagcctggtttcaaattagcaggcaagctggtacttcttaccgcactgcgctatggcccggcgggtgtggcgggctgggcgataaaaagtgttgctcgccgaccgctgaaaatgttgctggctgtggcgctggaaccgctgttaagtcgggctgctaataaactggcacagcgttataaaaggtgaggggagtttcgcaaaaattgttaaatctcaggcgtataatggatggcaattttcatccatagaaggacgcttacatgtttaaaaaaggcttacttgctctggcactggtgtttagtctgcccgttttcgccgctgaacactggatcgatgttcgtgttccagagcagtatcagcaagagcacgttcagggggccatcaatattcccctgaaggaagtgaaagagcgcattgccaccgccgttccggataaaaacgacaccgtgaaagtgtattgcaatgccggacgccagagtgggcaagcaaaagagatccttagcgagatgggatatacccacgttgagaacgccggtggcctgaaagacatcgcaatgccgaaggtcaaaggttaaaagaattcaccatgagcggcgcttatgcgccgtttttttttctgtcacaccttatttacatccccatagattatttgcgtcagctcacaaatacgctttttccctggtaaaaaatgatttcctgcgtgactaaaacccttgtgctcaattgacagtttattttctgcggagtagtctctcgtttcatgggaccgctaccacggaaaggcaacatgaaacagaaaattacggattacctggacgaaatctacggtggaacatttaccgcaactcatttacagaaacttgtaacgcgtcttgagagtgcgaaacgattaattacacagcgacgtaaaaaacactgggatgaaagtgatgtcgtgttaattacctatgccgatcaatttcacagcaatgatttaaaaccattacccacatttaatcagttttaccatcaatggctgcaaagcatttttagtcatgttcatttgttgccgttttatccatggagttctgatgatggctttagcgtaattgattatcatcaggtcgccagtgaagcgggggagtggcaggatattcagcaactcggtgaatgcagtcatttaatgtttgattttgtctgcaaccatatgagcgcaaaaagtgaatggtttaaaaactatttacaacagcatccaggttttgaagatttttttattgccgttgacccgcaaaccgatctcagcgccgtcactcgcccgcgtgcgttaccgttattaacgccattccagatgcgcgatcatagtacgcgccatttatggaccacctttagtgacgatcaaattgacctgaattaccgtagccctgaagtgttgctggcgatggtggatgttttactctgttaccttgcgaaaggtgctgagtatgtccgcctggatgccgttggctttatgtggaaagagccgggaacaagctgcatccatctggaaaaaacacatctgattatcaaactgttacggagcattattgataacgttgcgccaggtacagtgatcattaccgagaccaatgttccgcataaagacaacattgcttactttggcgcaggcgatgacgaagcacatatggtgtaccagttcagcctgccgccactggtgctgcatgcggtgcaaaaacagaacgttgaggcgctttgtgcgtgggcgcaaaacctgacactaccttccagcaacaccacctggtttaacttcctcgcctctcacgatggcatcgggctaaacccgctacggggcttgttgcctgaaagcgaaatattagagctggtcgaggcgttacagcaggaaggtgcattagtaaactggaaaaataatcccgacggtacacgcagtccgtatgaaataaatgtgacctatatggatgcgttaagccgccgtgagagtagcgatgaagaacgttgcgccaggtttatccttgcccatgcgattttgttaagtttccccggtgtgccagcgatatatattcaaagtattcttggcagccgtaatgattacgcaggtgtcgaaaaactcggatataaccgtgcgattaaccgtaaaaaatatcacagtaaagagataacccgagaactgaacgatgaagctacattaaggcatgcggtatatcatgagttgagccgtttaattacacttcgtcgcagccataacgagtttcatccggataataattttaccattgatacgattaatagttccgtaatgcgtattccaagaagtaacgctgatggtaattgtctgactggattgtttaatgtcagtaaaaatattcagcatgtaaatattactaatctgcatggtcgggatctgattagtgaagttgatatattgggtaatgaaataacgctgcgcccctggcaggttatgtggattaaataaaaaggaacatctcatgattaaaagtaaaatcgtgctgttaagtgcactggttagttgcgccctgattagtggctgtaaagaagaaaataaaacgaatgtatccatcgaatttatgcattctagcgtggagcaggagcgccaggccgttatcagtaaattgattgcccgttttgaaaaagaaaaccctggcatcaccgttaagcaagtgcccgtggaagaagatgcctataacactaaagtcattactcttagtcgtagcggtagcctgccggaagtgatcgaaaccagccatgactacgccaaagtgatggacaaagagcagcttatcgatcgcaaagcggttgccacagtcatcagcaacgttggtgaaggcgcgttttacgatggcgtactgcgtattgtgcgtaccgaagatggtagcgcatggaccggtgttcctgtcagcgcctggattggcggtatctggtatcgcaaagatgtgctggcaaaagcggggcttgaggagccgaaaaactggcaacagctgctggacgttgcacagaaactgaatgacccggcgaataaaaaatacggcattgcgctgcctacagcagaaagcgtgttgacggaacaatccttctcccagtttgcgttatccaaccaggctaacgtctttaacgccgaaggcaaaatcacccttgatacaccagagatgatgcaggcactgacctattaccgcgaccttactgccaacactatgccgggttctaacgacatcatggaagtgaaagacgcctttatgaacggcaccgcgccgatggcgatttactccacctatatccttccggctgtgattaaagaaggcgacccgaaaaacgtcggtttcgtggtgccaaccgagaaaaactctgcggtctacggcatgttgaccagcctgaccattaccgccgggcaaaagaccgaagagacggaagcagcagaaaaatttgtcacctttatggagcaggcagacaacattgccgactgggtgatgatgagcccaggtgctgcgctgccggtgaataaagcggtggtgactaccgccacctggaaagacaacgacgttattaaggcgctgggtgaactaccgaatcagctaatcggtgaactgccaaatattcaggtttttggcgcagtaggggataaaaactttacccgcatgggtgatgtgacgggttctggcgtggtgagtagtatggtgcataacgtcaccgtgggtaaagccgatctctctactacgctgcaagcgagccagaaaaaactggatgaactgatcgaacagcactaaacccaggacaggaatccgcaatgaacaggctttttagtggtcgttccgatatgccctttgcgctgctgcttctcgcgcccagcttattactgctgggcggtctggtggcgtggccgatggtgagcaatatcgaaatcagttttttacgtctgccgctcaatcccaacatcgagagtacgtttgttggggtgagcaactatgtgcgtatcctctccgatcccggcttctggcatagcctgtggatgacggtctggtataccgcgctggtggtggcgggcagcaccgtgctcgggctggcggtggcgatgtttttcaaccgcgagttccgcctgcgcaaaaccgcgcgtagcctggtgatcctctcctacgtaacgccgtccattagcctggtgttcgcctggaaatacatgttcaacaacggctacggcattgttaactacctcggcgtcgatcttctgcatctctatgagcaggcaccgctgtggttcgataatccgggcagtagctttgtgctggtggtgctgttcgccatctggcgctacttcccgtatgcctttatcagctttctggcgattttgcagaccatcgacaaaagcctgtacgaagcggcagagatggatggcgctaatgcctggcaacggtttcgtatcgtcacgctgcccgcaattatgccggtcctggcgacggtggtgacactgcgcaccatctggatgttctacatgttcgcggatgtttatttgctgacgaccaaggtcgatattctcggtgtatatctctacaaaaccgcctttgcctttaatgatttaggaaaagcggcggcgatcagcgtggtgctcttcatcattattttcgctgtcattctgctgaccaggaaacgggtgaacctcaatggcaacaaataaacgcacactcagtcgcatcggtttttactgcgggctggcgctgtttctcatcatcacgctgtttccattttttgtgatgctgatgaccagcttcaagggcgcgaaagaggcgatcagtctgcatcctacgctgctgccgcagcagtggacgctggagcattacgtcgacatttttaacccgatgattttcccgtttgtcgactacttccgtaacagtctggtggtgtctgtggttagttccgtggtggcggtattcctcggcattcttggggcttacgcgctttcccgcctgcgctttaaaggtcggatgaccatcaacgccagcttttacacggtgtatatgttctctggcattttgctggtggtgccgcttttcaaaatcatcaccgcgcttggcatttacgacactgagatggcgctgatcatcaccatggtgacgcaaactctgcccaccgccgtgtttatgctgaaaagctacttcgacaccatccccgatgagatcgaagaagcggcgatgatggatggcctcaaccgtctgcaaattatcttccgcatcaccgtgccgttggcgatgtccgggctgatatccgtgttcgtctactgctttatggtggcgtggaacgactatctgtttgcgagcattttcctctccagcgccagcaatttcaccttaccggtgggcctgaacgcgctgttcagtacgccagattacatctggggacggatgatggcggccagtctggtgaccgcattgccggtggtgattatgtatgcgcttagcgaacgttttattaagagtggtttgaccgccggtggcgtgaagggctaaagcggccagtttctttacaaggagttttaaatgaaaaagttagtagccacagcaccgcgtgttgctgcgctggttgagtatgaagatcgggcgattttagctaatgaagtgaagatccgcgtgcgtttcggcgcaccgaaacacggaacggaagtggtcgacttccgcgccgccagcccgtttattgatgaagactttaacggcgaatggcagatgttcactccgcgtccggcagatgcgccgcgcggcattgagtttggcaaattccagcttggcaacatggtggttggcgacattatcgagtgcggcagcgacgttaccgactacgcggtgggcgacagcgtatgcggctacggcccgctctccgagacggtcatcattaacgcagtgaataactacaagctgcgcaaaatgccgcaaggcagctcctggaaaaacgccgtctgctacgacccggcgcagtttgccatgagcggcgtgcgcgatgccaacgtgcgcgtaggggattttgtggtggtggtagggcttggcgcaatcggtcaaattgccatccaactggctaaacgcgctggcgcttctgtggtgattggcgtcgatcctatcgcccatcgctgtgatattgcccgtcgccacggcgcggatttctgccttaaccccatcggcactgatgtaggtaaagagatcaaaacgctgaccggcaagcagggtgccgatgtgattatcgaaaccagcggctacgccgacgcgctgcaaagcgcgctccgcggtctggcttatggcggcaccatctcctatgtcgcgtttgccaagccgtttgccgaaggttttaacctcggacgcgaagcgcatttcaataacgccaaaattgtcttctctcgcgcgtgcagcgaaccgaacccggattatccgcgctggagccgcaagcgtattgaagaaacctgttgggaactgctgatgaacggttatctcaattgcgaagatttaatcgacccggtggtgacctttgccaatagcccggaaagctatatgcagtatgtcgaccagcatccggaacagagcatcaaaatgggcgttacgttttaattcaaaggaatgaaaaaaatgaaaatcggcacacagaatcaggcgttctttccggaaaacattctggagaaatttcgttatatcaaagagatgggcttcgatggttttgagattgacggcaaactgctggttaacaacatcgaagaagtcaaagcggcgatcaaagaaaccggtttaccggtgaccaccgcctgcggtggctatgacggatggattggcgactttatcgaagagcgtcgtcttaatggcttaaagcagatcgagcgcattctcgaagcgctggcagaagtgggcggtaaaggcatcgtcgttccggctgcgtggggcatgtttaccttccgcttaccgccgatgaccagcccgcgtagcctggacggcgaccgcaaaatggtgagtgattccctgcgcgtactggaacaggtcgccgcgcgtaccggaaccgtggtgtatctcgaaccgttaaaccgctatcaggatcatatgatcaacaccctcgccgatgcccgccgttacatcgtcgaaaacgatcttaaacatgtacagattatcggcgatttctatcacatgaatatcgaagaagataacctggcgcaggcgctgcatgacaaccgcgacctgctcggtcatgtgcatattgcggataaccatcgctaccagccgggcagcggcaccctggatttccacgcgctgtttgaacagctgcgcgcggataactatcagggctatgtagtgtacgaagggcgtatccgggcggaagatcctgcccaggcgtaccgtgatagcttggcctggttgcgtacctgctaagaggtctttgtgaaaagtgcaatgacaagctctccgctgcgggtcgcgataataggcgcaggccaggtggcggataaggttcatgctagctactactgcacccgcaacgatctggaactggtggctgtctgtgacagccgcctttcccaggcgcaggcgctggcagaaaaatacgggaatgcatccgtgtgggacgatccgcaggccatgctgctggcggtgaaacctgatgtggttagcgtctgcagtcctaaccgttttcattacgaacataccctgatggcactggaagcgggctgccatgtgatgtgcgaaaaaccgcccgccatgacgccagaacaggcgcgggaaatgtgcgataccgcgcgcaaactgggcaaggtgctggcctacgactttcaccatcgttttgcgctcgatacgcaacagctgcgtgaacaggtgaccaacggcgttttgggagagatttacgttaccaccgcccgcgccctgcgtcgctgcggcgttcccggctggggtgtctttaccaataaagaactgcagggtggtggcccgctgatcgacatcggcattcatatgctggatgctgcgatgtatgtgctgggctttccggcggtgaaaagcgtgaatgcgcatagctttcaaaagatcggcacgcaaaagagctgtggtcaatttggtgagtgggatccggcaacttacagcgtcgaagatagcctgtttggcaccattgaatttcataacggcggcattctgtggctggaaacgagttttgcactcaacatccgcgaacagagcattatgaacgtcagcttttgtggtgataaagctggtgcgacgctgtttccagcacatatctacaccgataacaacggtgaattaatgacgctgatgcaacgggaaatagcagacgacaaccgccatttgcgcagcatggaagcctttatcaatcacgtacagggcaagcccgtgatgatagccgacgccgagcaggggtacatcatccagcaactggtggcggcgttgtatcaatccgcagaaacagggacgcgtgtggaattatgaccaggccagtaacgttaagtgaaccccatttcagccagcataccctgaacaagtatgcaagcctgatggcgcaggggaacggctatcttgggcttcgcgccagccatgaagaagattacacgcgccagacgcgagggatgtatctggcggggctgtatcatcgggcgggaaaaggtgaaatcaacgaactggtgaacctgcctgatgtcgtggggatggagattgccataaatggtgaggttttcagcttatcccacgaagcctggcagcgtgagcttgactttgccagtggcgaattacgccgcaatgttgtctggcgtaccagcaacggcagtggttacaccatcgccagccgtcgctttgttagcgcagaccaactgccgctcattgcgctggaaatcactattacgccactggacgccgacgcgagtgtgctgattagtacaggcattgacgccacgcaaaccaatcacggtcgccaacatctcgacgaaacccaggtgcgggtgtttggtcagcatctgatgcaggggagctacaccacccaggatggacgcagtgatgtggccatcagctgttgctgtaaggtgagcggtgatgtgcagcaatgctataccgccaaagagcgccgtttactgcaacataccagtgcgcagcttcatgcaggcgagacaatgacgttgcaaaaactggtgtggatcgactggcgggatgacaggcaagctgctttagacgagtggggcagcgcgagccttcgccagcttgaaatgtgcgcgcagcagagttacgaccaacttcttgcagcaagtacagaaaactggcgtcaatggtggcagaaacgtcgtatcacggtaaatggcggcgaagcgcacgatcagcaagcgttagattatgcgctttatcatctgcgcatcatgacgcctgcccacgacgagcgcagcagcattgcggcaaaaggcttaaccggcgaaggctacaaaggccacgttttctgggatacagaagtatttttgttaccgtttcatctgtttagcgatccgacggttgcccgaagtttactgcgttatcgctggcacaacttgccaggcgcgcaggagaaagcgcgacgcaacggctggcagggcgcgctatttccgtgggaaagcgcgcgcagcggcgaagaagagacgccggaatttgccgccattaacattcgcaccgggctgcggcaaaaagtggccagcgcgcaggcggaacatcatctggtggccgatatcgcctgggcggttattcaatactggcagaccacgggggatgaaagtttcattgcgcatgaaggcatggcgctacttctggagacggcaaagttctggattagccgcgcggtgagagttaacgatcgtctggaaattcatgatgttattgggccagacgaatataccgaacatgtcaataataatgcatacaccagctatatggcccgctacaacgttcaacaggcgctgaatattgcccgccagttcggctgtagcgacgatgcgtttatccatcgcgccgaaatgttcctcaaagagctatggatgccagaaattcagcccgacggcgttttgccgcaggatgatagctttatggctaagccggcgattaatctggcgaaatacaaagcggcggcggggaagcaaaccatactgctggattatagtcgcgcagaagtgaacgagatgcagatcctcaaacaagctgatgtggtgatgctcaattacatgctgccggagcagttcagtgcggcaagctgtcttgccaatctgcaattttatgaaccgcgcactattcacgacagcagtttaagtaaagcaatccacggcattgttgccgcacgctgtggcctgctgacccaaagttatcagttctggcgcgaggggactgaaatcgatcttggtgctgatccgcatagttgtgatgatggtatccatgctgccgcaactggcgctatctggctgggggcgattcagggttttgccggggtgagcgtgcgtgacggtgaattgcatctcaatccggcgttacctgagcagtggcaacagttgtctttccctctgttctggcagggctgcgaattacaggtcactcttgacgcgcagcgtattgcgattcgaacttctgcgcccgttagtctgcgtttgaacggtcagcttataaccgtggctgaagaatctgttttctgtttgggtgattttattttgcccttcaatgggaccgctaccaaacatcaggaggatgaatgaaactgcaaggggtaattttcgatctggatggtgtaatcaccgataccgcgcatctgcatttccaggcgtggcagcagattgccgctgaaattggcatcagcattgatgcgcagtttaacgaatccctaaaagggatcagccgcgatgagtctctgcggcgcattctgcaacacgggggcaaagagggcgactttaacagccaggagagggcgcaactggcgtatcgcaaaaatctgctctatgtccacagtctacgcgagttgacggtcaacgctgttctacccggcattcgctctttgctggcagatctccgtgcacagcagatcagcgttgggctggcttctgtctccctgaatgcgccgacgattttagcggcgctggagctgcgcgagtttttcaccttctgcgcggatgcttcccaacttaaaaacagcaaaccggacccggaaatctttctcgccgcctgtgcagggctgggcgtgccgccgcaggcatgtatcggcattgaagatgcgcaggcgggcattgacgccattaacgccagcggtatgcgcagcgtggggatcggcgcgggcttaaccggggcgcaattactgttgcctagtacggaaagtctcacctggccgcggttaagcgccttctggcaaaacgtataacaaaggaatcaacatggctcagcttagcttacaacatattcaaaaaatctacgataaccaggtgcatgtggtgaaggacttcaacctggaaattgccgataaagagttcatcgtgtttgtcggcccgagcggctgcggtaagagcaccaccctgcgcatgattgccgggcttgaggagatcagcggcggcgatctgttgatcgacggcaaacgaatgaatgacgttccagccaaagcacgcaatatagcgatggtgttccagaactacgcgttgtatccgcatatgacggtttacgacaacatggcgtttggtctgaagatgcaaaaaatcgccaaagaggtgattgatgagcgggtgaactgggcggcgcaaattctcggcctgcgtgagtacctgaaacgtaagccgggggcgctttccggcgggcaacgtcagcgagtggcgcttgggcgggcgattgtacgcgaagcgggcgtgtttttaatggatgaaccgctctctaaccttgatgccaagctgcgcgtgcaaatgcgcgcagagatcagcaagctgcatcagaaactgaacaccaccatgatctacgtgacccacgatcagaccgaagcgatgaccatggcgacgcggattgtgattatgaaagacgggattgttcagcaagtaggtgcgccgaaaaccgtttataaccaacccgcgaatatgtttgtttccggatttattggaagtccagcgatgaattttattcgcggcacgatcgatggcgataaattcgttacggaaacgcttaaattaaccattcccgaagagaaattagcggttctgaaaacacaggaaagtttgcataagcccatcgtgatgggaatacgaccggaagatattcatccggacgcgcaagaggaaaataacatttccgccaaaattagcgtggcagaattaaccggtgcggaatttatgctctacaccacggttgggggcacgagttaaacggttgggggcacgagttagtggtccgtgctggtgcgttaaatgattatcatgcaggagaaaatatcactattcattttgatatgacgaaatgtcatttctttgatgcagaaacggaaatagcaattcgctaaatacagggggaaggcattcccccaggataatacaaggaacaataatgaaaaagttattaccctgtaccgcactggtgatgtgtgcgggaatggcctgcgcacaggccgaggaaaggaacgactggcactttaatatcggcgcgatgtacgaaatagaaaacgtcgagggttatggcgaagatatggatgggctggcggagcctagtgtctattttaatgccgccaacgggccgtggagaattgctctggcctattatcaggaagggccggtagattatagcgcgggtaaacgtggaacgtggtttgatcgcccggagctggaggtgcattatcagttcctcgaaaacgatgatttcagtttcggcctgaccggcggtttccgtaattatggttatcactacgttgatgaaccgggtaaagacacggcgaatatgcagcgctggaaaatcgcgccagactgggatgtgaaactgactgacgatttacgtttcaacggttggttgagcatgtataaatttgccaacgatctgaacactaccggttacgctgatacccgtgtcgaaacggaaacaggtctgcaatataccttcaacgaaacggttgccttgcgagtgaactattatctcgagcgcggcttcaatatggacgacagtcgcaataacggtgagttttccacgcaagaaattcgcgcctatttgccgctgacgctcggcaaccacagcgtgacgccgtatacgcgcattgggctggatcgctggagtaactgggactggcaggatgatattgaacgtgaaggccatgattttaaccgtgtaggtttattttacggttatgatttccagaacggactttccgttagcctggaatacgcgtttgagtggcaggatcacgacgaaggcgacagtgataaattccattatgcaggtgtcggcgtaaattacagcttctgataatgggctaaattgccggatgcggcgcgagtactttatccgatctataaatgtaggccggataagatgcgctagcatcgcatctggcattcaggcaaggtagctggtatttatttcagcgtcatatgcgtggcaacggtaatattctgtggactcggttttccagaaattaagcggaataataactcgcagctttgttgacctaactcctgcgtcggaacatcgatgccgcccggtgcaggcgttaaaataaaactcagcgtttcattgctataacccaccaccgctaactgctgcggaatagcaatatttttctctgctgccgcacgataaatgctcattaatttcaggctgtcagtggcaaacaccgcctcaggcaacggactctggcttaataattgccgtgctgcttttaatgcagtttcatgggtataaccgccatcaacaatccattcatcacgcactgcaatattatgcgcagccaggctctgcttataaccattaacgcgatcaacgctaacatggacatcaagcggagcatgcaggcaggcaatattttgatgcccactttcaattaatgcatcggtcaacgcaatgctgtcgccaaaattatcggtatcgacagaataaacatgggcatattgaccttcaactttgccaatcaccaccaccggaatatcatatttatcgagttgggcaaaaaaactctcatccgctgggctactgagcataataatgcctttaatcattttctgcttaattttgctttcgcatttttgcagatcttctgccggattgtggctcgtttgtaatatcacgtcgaaaccttcttcttcagctttggcggtgatggcatgcaaaacttcagagaaaaacggattacccgccgtagttttggtgctacgggtagaaatcaccataatggcatcaaaaccgctagaggtcagcgcgcgggccagcttgtttggctgatactgtaattcttcaatggcccgtaacactttttcgcgcgcttccggggagatattagtttgcttattcagcacgcgacttacggtggatttacttacgcctgcaaccctggcaatatcataaatagtaggggacataggtcaggaactccgtccgaacgtgaatgctgcacatcttatggagttcgccggtcgatgacaacacgggcagttgataatcaatggcctggcccccacattcatatccttacgaatgattttttttctggtcttcagagcagcacaggacagcaatgaagcgacttaaaaatgaactcaatgcgctggtgaatcggggtgtcgacagacatctgcgcctcgctgtaaccggacttagccgcagcggcaaaacagcgtttatcaccgcgatggttaatcagttgcttaatattcacgccggagcacgtttgccgctgttaagtgcggtgcgtgaagagcgcctgctgggcgtgaaacgcattccccagcgtgactttggcattccgcgcttcacctatgacgaagggctggcgcagttatatggcgatccacccgcctggccaacgccaacgcgcggcgtcagtgaaatccgcctggcgctacgttttaaaagcaatgatagcctgctacgccactttaaggatacctccacgctgtatctggaaattgtggattatcccggcgaatggttgctcgacctgccgatgctggcgcaggactatttaagctggagccgccagatgacgggcttactcaatggtcagcgcggagaatggagcgcgaaatggcgaatgatgagcgaagggctggacccgctagcgcctgccgacgaaaaccggctggcggacattgccgccgcgtggaccgattatctccaccactgtaaagagcaggggctgcactttattcagcctgggcgctttgtcttgccgggagatatggcaggtgcgcccgcgctgcaattcttcccgtggccggatgtcgatacctggggcgagtccaaactggcgcaggccgataagcataccaatgccggaatgctgcgcgagcgctttaattattactgcgagaaggtggtgaaggggttctataagaatcattttctgcgctttgaccgccagattgtgctggtggattgcctgcaacctctcaacagtgggccacaggcatttaatgatatgcgtctggcactgacgcagctgatgcaaagttttcactacgggcagcgtaccctgttccggcgtttgtttagcccggttatcgataagctattgtttgctgccactaaagcggaccatgtgaccatcgatcagcacgctaatatggttagtttactgcaacaactgattcaggatgcctggcaaaatgcggcgttcgaagggatcagcatggactgcctggggctggcgagtgttcaggcgaccaccagcggcattattgatgttaacggtgagaaaatcccggcgctgcgtggtaatcgacttagcgatggcgcaccgctcactgtttatcctggcgaagttcccgcacgtttgcctggtcaggcgttctgggataagcaaggcttccagtttgaggcatttcgtccgcaggtgatggatgtcgacaaaccactaccgcatattcgtcttgatgctgcgctggaatttttaataggagataaattgcgatgaccgaaccgttaaaaccacgtattgatttcgacggtcctctggaggtcgatcagaatcctaaattcagggcgcagcagacctttgacgaaaatcaggcgcaaaattttgccccggccacgctcgacgaagcgcaggaagaagaggggcaagtcgaagcggtaatggacgcagcgttacgtccgaaacgcagcctgtggcgcaaaatggtgatgggagggctggctctgtttggcgcaagcgttgtcgggcagggtgtacagtggacaatgaatgcctggcaaacccaggactgggtggcgctgggtggatgtgccgctggggcattgattatcggcgctggcgtaggttctgtggtaacagagtggcggcgcttatggcgcttgcgacagcgcgcccatgaacgcgacgaagcgcgtgatttattgcatagccacggcacgggcaaaggccgcgcattttgcgaaaaactggcgcagcaggcgggtattgatcagagccatccggcgctgcaacgctggtatgccagtatccatgaaacgcaaaacgaccgtgaagtggtcagcctgtatgcgcatttggtccagccagttttagatgcccaggcgcggcgcgaaatcagccgtagcgcggcggaaagtacgttgatgattgcggtcagcccgctggcgttggtcgatatggcgtttatcgcctggcgcaatctgcgtttaattaatcgcatcgccacgctgtatggcattgaactggggtattacagccgtttgcgtctgtttaagctggtattgctgaatatcgcttttgccggagccagcgaactggtgcgcgaagtggggatggactggatgagccaagatctcgctgctcgtttgtctacccgcgcagctcaggggattggtgcaggacttctgacggcacgactcgggattaaagctatggagctttgccgcccgctgccgtggattgacgatgacaaacctcgcctcggggatttccgtcgtcagcttatcggtcaggtgaaagaaacgctgcaaaaaggcaaaacgcccagcgaaaaataatgcaatatcgggtgctgaccggatatctttacgccgaagtgcccgtttttccgtctttgtgtcaatgattgttgacagaaaccttcctgctatccaaatagtgtcatatcatcatattaattgttcttttttcaggtgaaggttcccatgcgtctggaagtcttttgtgaagaccgactcggtctgacccgcgaattactcgatctactcgtgctaagaggcattgatttacgcggtattgagattgatcccattgggcgaatctacctcaattttgctgaactggagtttgagagtttcagcagtctgatggccgaaatacgccgtattgcgggtgttaccgatgtgcgtactgtcccgtggatgccttccgaacgtgagcatctggcgttgagcgcgttactggaggcgttgcctgaacctgtgctctctgtcgatatgaaaagcaaagtggatatggcgaacccggcgagctgtcagctttttgggcaaaaattggatcgcctgcgcaaccataccgccgcacaattgattaacggctttaattttttacgttggctggaaagcgaaccgcaagatagccataacgagcatgtcgttattaatgggcagaatttcctgatggagattacgcctgtttatcttcaggatgaaaatgatcaacacgtcctgaccggtgcggtggtgatgttgcgaagtacgattcgtatgggccgccagttgcaaaatgtcgccgcccaggacgtcagcgccttcagtcaaattgtcgccgtcagcccgaaaatgaagcatgttgtcgaacaggcgcagaaactggcgatgctaagcgcgccgctgctgattacgggtgacacaggtacaggtaaagatctctttgcctacgcctgccatcaggcaagccccagagcgggcaaaccttacctggcgctgaactgtgcgtctataccggaagatgcggtcgagagtgaactgtttggtcatgctccggaagggaagaaaggattctttgagcaggcgaacggtggtagcgtgctgttggatgaaataggggaaatgagtccacggatgcaggcgaaattactgcgtttccttaatgatggcactttccgtcgggttggcgaagaccatgaggtgcatgtcgatgtgcgggtgatttgcgctacgcagaagaatctggtcgaactggtgcaaaaaggcatgttccgtgaagatctctattatcgtctgaacgtgttgacgctcaatctgccgccgctacgtgactgtccgcaggacatcatgccgttaactgagctgttcgtcgcccgctttgccgacgagcagggcgtgccgcgtccgaaactggccgctgacctgaatactgtacttacgcgttatgcgtggccgggaaatgtgcggcagttaaagaacgctatctatcgcgcactgacacaactggacggttatgagctgcgtccacaggatattttgttgccggattatgacgccgcaacggtagccgtgggcgaagatgcgatggaaggtagcctggacgaaatcaccagccgttttgaacgcagcgtattaacccagctttatcgcaattatcccagcacgcgcaaactggcaaaacgtctcggcgttagtcataccgcgattgccaataagttgcgggaatatggtctgagtcagaagaagaacgaagagtaagcgcgaatatgcctgatggtgcaacaccatcaggcatattaaattatgctttcagtacagccagagctgcttcgtaatccggctcggtggtgatttcatccaccagctggctgaaaatcacattgtcattttcgtcaataaccacaacggcacgcgctgccagacctttcagtgggccatcagcaattgccacaccgtaagcttgcagaaattcagcgttacggaaagtggagagggtgataacgttgttcagaccttctgcgccgcagaaacgagactgggcgaacggcagatcggcagagatacacagcacaacggtgttgtcgatctcagttgccagttggttaaacttacgtacacttgcggcgcaaacaccggtatcaatactcgggaaaatgttcagcactttgcgtttacccgcaaactgaccgagggtgacgtcagacagatcttttgccacgagagtaaaagtctgcgctttgctacccgcctgcgggatggaattggcgactgtaaccgggttgccctggaaatgaacggtttgactcatgattatctttcctgtttacatatagttaacgtcacacctagtttatgctaactgtcaataacacagcaaacgctattacagggtctccttacaacaactgtcaacgcagtttgtaattaaaagattaacccatatctggtgaatgaaacagtgatgaaccttctgccagatcaataaatcagaaaaatttaatgatatgacagaaggatagtgagttatgcggaaaaatcaggcaacgttacgcgtatgaccagcaagctgggccagcgcatcgttattttcgatggtgatgtatttacctttgactgccagcatgccgcttttctggaagcgacccagcagacggctgatggtttctaccgtcaggcccagatagttaccgatatcgccacgagtcatcgtcaggcggaattcacgaggggagaagccgcgttgggcaaaacgacgggacaggttgtagatgaatgcagccagacgttcctcggcatttttcttgctcaacagcaggatcatgtcctgatcgcctttgatttcaccgctcatcagacgcatcatctgctgacgcagattcggcattttaccggacaaatcgtccagcgtttcgaacgggatttcacataccatgctggtttccagcgcctgcgcgaagctcgggtgatggccgctgccgatggcgtcaaatcccaccaggtcgcctgctaaatggaaaccagtgatttgctcgtcgccttgctcagtgatggtataacttttaatcgtaccggagcggatggcataaaggcttttaagttcatcaccagccttaaacagcgtctggcctttctgaataggcttcttccgctcaatgatattatcaagctgatcaagctcatgttcgttgagtgtgaacgggatgcaaagctggctgatgctgcaatcctggcaatggatagcacaaccgccagactgaatgcgccgtataattcgcttttccgggatcataggtctgctcaagccgtaattgatatttgtcaattttaacatctttttagggagcaagtaagtctaagcaaaccttaacagcagagaattccgatattagatgtaaatatatgtctatctatttgaaaacccttaagttgttaagggtaactttacataaaagtgtgaacaagctggcacaaattgtttaatgtttacagcaaaagataaccttcatggcgcaataaccactcttttcgctgaactccgcctgcatatccggtcatggtgccgtttcggccaataacccgatggcaaggtacgacgatgctgatgggattgcttccgtttgccgcaccaacggcacgcgccgcgccaggacggcccaattgctcagccagttggccgtaatgcattacctgcccgcaggggatagtgcgtagtgttttccagacttcgcgctgaaatggcgtcccccccgtagcagtgggaagcgtatcaataatgctaagattaccggcaaaatattcacgaagcttgtcgcttaaaccgcctggattggtggcagaaatgcgctcatagccttctttgcgataatggatgtccagcagctgcaccatgcgttcgctgtactcttcccattcaaccgcccgcaggcgaaattgctcatcgcaaatcacccacagtggacccagtggcgtggcaattttttcttcaagtaatctcagcatccgttctctcttaagacaaacgtgggtaaatacccggacctatcggcagaccgacaagataccacgccagcacatcgcagccatactatgcagaaacaatgctgtcgatggctgcttttgcgtcagactgtgctttcgctgccatttccggaccgtatgcgatcccttcggcgaagacaaatttcacatcggtaatgccgataaagccgaggaacgtggacagatacggcgtcaccaggtccgttggtccatctttgtggatcccgccgcggctggtaataacgatggcttttttacccgttaccagaccttccggaccgttctcggtatagcggaaagtaacgcctgcgcgggcaaccaggtcaaaatagtttttcaactgagtcgagatgttgaagttatacatcggtgccgcaataacgataacgtcgtgggctttcagctcggcaatcaactcatcggaaagtgccagagcttcctgctgacgcggagtcagcggcgcatcgctcggacgcagagcgccaaccagttcgccatccagtaccggaatcggatttgcagccaggtcgcgaacggtgatttcatcagcggagtgcttttcgcgccattgttcaacaaaataatcggacaactgattagactgagagtaccctgccaggatgctggatttaagaactaataccttgctcatggtgtttccttatagatgtttgaatgggcgatgccccgttgcttgttgacactttattcacaatcctgccacagagatagcgcaataaatcgaagcctatgttcgaatttattgaacaacgcatagaaagccgcgatgtggtactctatatctatcatttaaaagaaaattaatcaggcagactactgcccactaacgttatgacagaacaacaaaaattgacctttacggccttgcagcagcggctggattcgctgatgctgcgtgacagactgcgtttttctcgccgtctgcacggcgtgaagaaggttaaaaatcctgatgcacaacaggccattttccaggagatggcgaaagagattgaccaggcggcagggaaagtcctgctgcgtgaagcggcacgaccggaaattacttatcctgacaatttaccggttagtcagaaaaaacaggacattctcgaagcgattcgtgatcaccaggtggtgatcgtcgccggggaaacgggttctggtaaaacgactcagttaccgaaaatctgtatggagctggggcgcgggattaaaggactgatcggccatacccagccgcgtcgtctggcggcaagaacagtggcgaaccgtattgcggaagagctgaaaacggagccgggcggttgcatcggttacaaagtgcgtttcagcgatcacgtaagtgataacacgatggtcaagctgatgaccgacggtatcctgctggcggagatccagcaagaccgcctgctgatgcagtacgacactatcattattgacgaagcgcacgaacgcagcctgaatatcgattttttgctcggctatttgaaagagttgctgccgcggcgtcctgacctaaaaatcattatcacttccgcgactatcgacccggaacgctttagccgccactttaataatgcgccgattattgaagtctccggtcggacctatccggtggaagtgcgctatcgcccgattgttgaagaagccgatgacaccgagcgcgatcagttgcaggcgatttttgacgccgtagacgaactgagtcaggaaagccatggcgacattctgatctttatgagcggcgagcgggaaatccgcgataccgccgatgcgctgaacaagctgaacttacgccataccgaaatcttgccgctttatgcgcggcttagcaacagcgaacaaaatagggtattccagagccacagcggacggcgcattgtgctggcgaccaacgtcgcggaaacgagcctgaccgtaccggggattaaatacgttatcgaccccggtacagcgcgtatcagccgctacagctatcgcaccaaagtgcagcgtttgccgattgagccgatttcccaggcgtctgccaatcagcgtaaaggccgctgtggtcgtgtgtccgaagggatctgtattcgtctctattccgaagacgatttcctcagccgcccggagtttaccgatccggagattctgcgtaccaacctggccagcgttattttgcagatgaccgcgctggggctgggcgatatcgctgcgttcccgtttgtcgaagcaccggataaacgcaatatccaggatggcgtgcgtctgctcgaagagctgggcgcgatcaccactgatgaacaggccagcgcctataaactgacgccgctcggtcgccagctcagccagttgcctgtcgacccacgtctggcgcgtatggtgctggaagcgcaaaaacatggctgcgtgcgtgaggcgatgattatcacgtccgcgctctccattcaggatccgcgcgaacgtccgatggacaaacagcaggcaagcgacgaaaaacatcgtcgcttccacgacaaagagtctgactttctcgcgtttgtgaatctgtggaattatcttggcgagcagcaaaaggcgctttcttccaacgccttccgtcgcctgtgtcgtaccgattatctcaactatctgcgcgtgcgcgaatggcaggatatctacacccagttgcgtcaggtggtgaaagaacttggcattccggttaacagcgaaccggcggagtatcgcgaaattcacattgcgttgctgaccggtttactttcccatatcggcatgaaagatgccgataaacaagaatataccggcgcacgtaacgcgcgtttctccatcttccccggttctggtttattcaaaaaaccgcctaaatgggtaatggtggcggaactggtagaaaccagccgcctgtgggggcgcattgctgcgcgtatcgacccggaatgggtggagccagttgctcagcatttgattaaacgcacctacagcgaaccgcactgggaacgggcgcagggcgcggtgatggcaacggaaaaagtcactgtttatggtttgccgattgttgccgcgcgcaaggtcaactacagccagatcgatccggcgttatgtcgtgaactctttattcgccacgcgctggtggaaggtgactggcagacgcgtcacgcattcttccgtgaaaacctgaaactacgggcggaagtagaagagctggaacacaaaagtcgtcgccgcgatattctggttgatgacgaaacgttgtttgagttctacgaccagcgcatcagccacgatgtaatctccgctcgccacttcgacagctggtggaaaaaagtcagccgcgaaacgcctgatttgctcaactttgaaaaaagcatgttgatcaaagagggcgcagaaaaaatcagcaagctggattacccgaacttctggcatcagggcaatctcaagctgcgtttgagctatcagtttgagcccggcgcggatgctgacggtgtgaccgtacatattccgctgccgttacttaaccaggttgaggaaagcgggtttgaatggcagatccccggtctgcgccgcgaactggtgattgctctgattaaaagcttgccgaaaccggtacgccgtaattttgtacccgcgccaaactatgccgaagcgtttttaggccgcgtcaaaccgctggagttaccgttgctcgacagccttgagcgcgagttacggcggatgaccggcgttaccgttgaccgcgaagactggcactgggatcaggtgcccgatcacctgaaaattaccttccgcgtggtggatgacaaaaacaagaagctaaaagaagggcgcagcctacaagatctgaaagatgcgctgaaaggcaaagtgcaggaaacgctatctgcggtggcggatgacggtatcgagcagagcggcttacatatctggagttttggtcagctgccggaaagctacgaacagaagcgtggcaactacaaagtgaaggcgtggccggcgctggtggatgagcgcgacagtgtggcgatcaaactgtttgataacccgctggagcaaaagcaggcaatgtggaacggtcttcgccgtctactgctgctgaatattccaagcccaatcaaatatttacatgaaaagttaccgaacaaagccaagctgggactgtactttaacccgtatggcaaagtgctggagctgatcgacgactgtatctcctgcggtgtggataaattgatcgacgccaatggtggcccggtctggacggaagaaggctttgctgcgctgcatgaaaaagtgcgtgccgaactgaacgacacggtggtggatattgcgaagcaggtcgagcaaatccttacggcagtgttcaatatcaacaaacgtctgaaagggcgggtggatatgaccatggcgctggggctttctgacattaaagcgcagatgggcgggttggtatatcgcggttttgtcactggtaacggcttcaaacggctgggcgacacgctgcgatatttgcaggcgattgaaaaacggctggaaaaactggcggttgatccacatcgcgaccgtgcgcagatgctgaaagtcgaaaacgtccagcaggcgtggcagcaatggatcaacaaactgccgcccgcacgtcgtgaggatgaagacgtgaaagagatccgttggatgatagaagagttgcgcgttagttacttcgctcaacaacttggtacgccttatccgattagtgataagcgtattttgcaggcgatggagcagattagcggttaaccctgctatttgcctgataaagaaaaaacccggtaagcatttagcgccgggttttttattaattctaaaacggtaagggtaaaaattcaggaattcagaaaaatacaattctctgctgcaagatgaataatgtttatctacagcatttccttaaaagatatgtcaggcttgcggagtggcggttaaggacatacgatttcctcctttcagagtgctccgcttctcactattatctcacgcagtattcttaagggaacgataaggaggaaccatgaacattaccccgtttccgacgcttagcccggcaactatagatgccataaatgttatcggacagtggctggcgcaggatgatttctccggtgaggtgccgtatcaggccgattgcgtgatccttgcaggcaatgcggttatgccgactatcgatgcggcatgtaagattgcccgcgatcagcaaattcctttactgattagtggtggtatcggtcacagcacaacttttttgtatagcgccatcgcacagcatccgcactacaacactatccgcaccactggcagagcagaagcgaccatcctggcggatatcgctcatcagttctggcacattccgcatgaaaaaatctggattgaagaccagagtacaaactgcggtgaaaacgcacgctttagcatcgcgctattgaatcaggccgtagaacgagttcatacggctatcgttgttcaggaccccaccatgcagcggcgcacgatggcgacgttccgccgtatgactggggacaatcccgatgcaccacgctggttaagttatcccggattcgttcctcagttaggaaataacgcagacagtgtaatctttattaatcagttacaaggattatggccagttgagcgttatctcagtctactcactggcgagctgccgcgtttacgcgatgatagcgatggctacggtccccgcgggcgagattttatcgttcacgttgattttccggcagaagtcatccatgcatggcaaacgctgaaacatgatgcggtgctcatcgaggcgatggaaagtcgcagcttacgttaaaaattgcccgtttgtgaaccacttgtttgcaaacgggcatgactcctgacttttatttctgccttttattccttttacacttgtttttatgaagcccttcacagaattgtcctttcacgattccgtctctctgatgattgatgttaattaacaatgtattcaccgaaaacaaacatataaatcacaggagtcgcccatgagtgtacccgttcaacatcctatgtatatcgatggacagtttgttacctggcgtggagacgcatggattgatgtggtaaaccctgctacagaggctgtcatttcccgcatacccgatggtcaggccgaggatgcccgtaaggcaatcgatgcagcagaacgtgcacaaccagaatgggaagcgttgcctgctattgaacgcgccagttggttgcgcaaaatctccgccgggatccgcgaacgcgccagtgaaatcagtgcgctgattgttgaagaagggggcaagatccagcagctggctgaagtcgaagtggcttttactgccgactatatcgattacatggcggagtgggcacggcgttacgagggcgagattattcaaagcgatcgtccaggagaaaatattcttttgtttaaacgtgcgcttggtgtgactaccggcattctgccgtggaacttcccgttcttcctcattgcccgcaaaatggctcccgctcttttgaccggtaataccatcgtcattaaacctagtgaatttacgccaaacaatgcgattgcattcgccaaaatcgtcgatgaaataggccttccgcgcggcgtgtttaaccttgtactggggcgtggtgaaaccgttgggcaagaactggcgggtaacccaaaggtcgcaatggtcagtatgacaggcagcgtctctgcaggtgagaagatcatggcgactgcggcgaaaaacatcaccaaagtgtgtctggaattggggggtaaagcaccagctatcgtaatggacgatgccgatcttgaactggcagtcaaagccatcgttgatagtcgcgtcattaatagtgggcaagtgtgtaactgtgcagaacgtgtttatgtacagaaaggcatttatgatcagttcgtcaatcggctgggtgaagcgatgcaggcggttcaatttggtaaccccgctgaacgcaacgacattgcgatggggccgttgattaacgccgcggcgctggaaagggtcgagcaaaaagtggcgcgcgcagtagaagaaggggcgagagtggcgttcggtggcaaagcggtagaggggaaaggatattattatccgccgacattgctgctggatgttcgccaggaaatgagcattatgcatgaggaaacctttggcccggtgctgccagttgtcgcatttgacacgctggaagatgctatcagtatggctaatgacagtgattacggcctgaccagtagtatctatacccaaaatctgaacgtcgcgatgaaagccattaaagggctgaagtttggtgaaacttacatcaaccgtgaaaacttcgaagctatgcaaggcttccacgccggatggcgtaaatccggtattggcggcgcagatggtaaacatggcttgcatgaatatctgcagacccaggtggtttatttacagtcttaatgagtgaaagaggcggaggttttttcctccgcctgtgcgcgtcagagtttagcgaatttttcgagggtgcgaataagctgtgtgacgaagccatattcgttatcgtaccaggcgaccgttttcaccagttgtaaatcgcccacggcggtaatttccgtttgcgtggcatcaaacaccgaaccgaaatggctgccaatgatatcggaagagactatttcttcatcggtataaccaaatgactcgttattggtggttgcttgtttaagtgcgttattcacctcttcggcagtcacttttttccgagaatcgataccagttcagtgaccgaacctgttttcaccggcacgcgttgcgcatgacctttcagtttgccgctcagttccgggatcaccagaccaatggcttttgccgcccccgtagtgtggggaatgatattttctgccgctgcgcgtgaagcacgtaaatctttaccacgcgggccatccaccagtgactgggtgccagtataggcatgaatggtcgtcatcgtgccgacttctatcccgaaactgtcatgcaaggctttggccatcggcgcaagacagttagtggtgcatgacgccacggaaacaatggtgtcgttgccatccagagtgtcgtcattgacgttataaacgatagttttcatttcaccggcaggggcggaaatcaacaccttcttcgcaccagcatcaagatgcgcctgcgatttctcggcggaggtataaaagccagtacattcgacaatgatttctgcacctttcgctttccacggaatatttttagcctctttttcggcgtaaaccgcgatacttttcccatcaacgataagtgaatcttccgtaaaatcaacgctccaggggaatggtccgtagtttgaatcatgtttcagcaggtaggcgagaatttatggggaagtgagatcattaatagcgacaacgtctatgttgcttttgacttcaagtaatcgacccaacaccagtcgaccgatacgaccaaaaccgttaataccaactttactcatggttttctcctgtcaggaacgttcggatgaaaattgatcctttccaagcttagaccaggatggcgggatgggcaatctccattctcacagtgaaacgtaacgtactgaaaacgggtgaacaatatttaatgaaattttgagaaaagcccgttatgttaacggaaaattatgttaaagcaggaaatgttatggaaaataaatatagtaggttacaaatcagcattcactggctggtctttttactggttatcgcagcgtattgcgcaatggagtttcgtggtttcttcccacgtagcgatcggccactcatcaacatgattcatgtttcctgtggcatcagtattctcgtgctgatggtcgttcgtcttttgttaaggctgaaatacccaaccccgccgattatacctaagccaaaaccgatgatgacgggactggcgcatttgggacatttggtgatttatctcctgtttattgcgctgccagtgattggtttggtgatgatgtataaccggggcaacccgtggtttgcgtttggtttgacgatgccttacgctagtgaggccaatttcgaacgggtagatagcttaaagagctggcatgaaacgctggcgaatctgggatattttgtcatcgggttgcacgctgcggctgcactggcacaccactatttctggaaggacaacacacttctacgcatgatgccgcgtaaacgttcctgaaggatatttaaagaaaacgcctgtactaaaaccgacccgtggtacaggcgaagaatacgggtctacatcggaagcgcctattatatttatttgtatgataaataaaaccataatccttgcccatacgtccatctggcttatttttaatcaattcacccgatctttgatctcatcaacggtatcaaaataaaccagcgtataacgttcaaatcgaacataagattcgataaaccatggaggttatatgaaaaaactggcacttattttgtttatgggaacgcttgtttccttttatgccgatgccgggcgcaaaccctgttctggtagcaaaggggggatcagtcactgtacggcaggcggcaaatttgtctgtaatgatggttctattagtgcaagcaaaaaaacatgcactaactgaagtgtaaaaggggtgccatgagaaaatgaatctgctagtcaaatgcgcggggaaaatccccgcgcttgcccttacctggacgtgcaggccatgagcgcagcaacctccttatcaccgtcccggaaccgcagttcgtagagcgtttgtcgggtcaggagtgtgaatgtcagaatcgtaatgcagataatgagcagacacaccaccagagggttgtgcttcatagcctttctccttgccggatggcgggtaagaggctaagatctgaattgctaggttcattcgttggcctcggttgatagaaatatcggtcggggccttcgtctttctgattcccggttagcctgaaaacagaaagtctcaggcacccgcaggcatcctatgaggtttccttagggacgaaaataatcacttcacgaaattgcgtgctgttttccagaatttttcgtcattcgggttagccagtttagccattcgttactctcttcattccaatagcattaattttctatgcaataattgttgtaaaaatgtgacgcaaagaggtttttggtcataagtaattaccgtcaagtgccgatgactttctatcaggagtaaacctggacgagagacaacggtaatgaatacaactcccagtcagcgattaggttttttgcatcacatcaggttggttccgttatttgcctgcattctaggcggtatcttagttctattcgcattaagtagtgccctggctggctatttcctctggcaggccgatcgcgatcagcgtgatgttactgcggagattgagattcggaccgggttagcgaacagtagtgattttttgcgtagtgcccggatcaatatgattcaggccggggctgcgagtcgtattgcggaaatggaagcaatgaagcgaaatattgcgcaagccgaaagcgagattaaacagagccagcaaggttatcgtgcttatcagaatcgaccggtgaaaacacctgctgatgaagccctcgacactgaattaaatcaacgctttcaggcttatatcacgggtatgcaacctatgttgaaatatgccaaaaatggcatgtttgaagcgattatcaatcatgaaagtgagcagatccgaccgctggataatgcttataccgatattttgaacaaagccgttaagatacgtagcaccagagccaaccaactggcggaactggcccatcagcgcacccgcctgggtgggatgttcatgattggcgcgtttgtgcttgccctggtcatgacgctgataacatttatggtgctacgtcggatcgtcattcgtccactgcaacatgccgcacaacggattgaaaaaatcgccagtggcgatctgacgatgaatgatgaaccggcgggtcgtaatgaaatcggtcgcttaagtcgtcatttacagcaaatgcagcatagtctggggatgacagtagggactgttcgacagggcgcggaagagatttatcgtggcaccagcgaaattagtgctggcaatgcggacctgagttctcgcaccgaagaacaagcggcggctatcgaacaaactgccgccagcatggagcaactcactgcgacggtgaaacagaatgcggataacgcgcatcatgccagcaaactggcgcaagaggcttctattaaagccagcgatggcgggcagacggtttccggtgtagtaaaaacgatgggcgctatctccacgagtagcaagaaaatttctgagatcaccgccgtcatcaacagtattgctttccagacgaatattctggcactgaatgctgccgttgaagccgcgcgagcgggtgagcaagggcgtggatttgccgttgtcgccagcgaagtacggacactcgcaagtcgcagcgctcaggcggcgaaagagattgaaggcttgatcagtgaaagtgtcaggttaattgacctggggagcgatgaggtggcaacggccgggaaaaccatgagcactattgttgatgccgtcgcgagtgtcacacatatcatgcaggaaatcgccgccgccagcgatgaacaaagtagaggcataacgcaggttagccaggcgatttctgaaatggataaggtgacgcaacagaatgcttctctggtagaagaggccagtgcggcggcggtgtcccttgaagaacaggcggcacgattaactgaggcggtggatgtattccgtctgcacaaacattctgtgagcgcagaacctcgcggagcgggtgaaccagttagtttcgctacggtgtgaaaatgttcaaggagggatcgacagatcccttcacctttcagaacggcatactttttcgaatagcgttaatcatcaactggcaaccagaagagaacgtcgcatctacgcgggtcagtattccaatcggttcgcctgcaccatgtcccggaacaggcagggccaccagcgtggcatgacgcaggtcgtcttttacagcgccagaagggacaaaccacacgtaatcgtattcaaccgtaagttgacgagataggctagcagacagcgtttcgatacaaccgctaggaattttacagccctggctctgcactaatgcatcactatgctggcgtggcgcagtgccttctggacttacaacgaccggccattccagcacccggcttagcgttacgttctcctgaagtagcgggtgattagggcggacaaccagcttcaagctttcaagaaacagcagttcgtaattaagcccggtcatcagttcaggatcactcatccgaccaatgccgatatcgatttccccggtttttaaacccgccagaatcatagggttactcattgtcgcaacttgcaaggtcgtctctttttgttgctgatgaaactgacctataacgctaggtaatatccccagtgccgcagtaggtagtgcaccaaccctgacgacatcattattaagaccttctttacgatgaaggctccgtccggcagtgttgatggcgtcaagaactctgactgcatgcgttaaaaattgttcgccgggtaaggtaagttgcgccccctgacgaccacgctcaaacaagcgagcgccagtcagctgctccagttcattcaatgtcttagagagcgcaggttgactcaaattaagggtttcagccgcgcgccccaaagttccttgttgtgcgacagctacgaatgtatgaaggtggcgcaaacggatgcgctgactaaacagactatttttttccataagcgatgttaaaaacgaagcggtgtcgctgacaagtgaagttgtttgattatgataacttgattgcaaaatattattaacaattaaagcaattatgttacagcaaaatggataatattgatgttttcgcggcgagatcacagtttgtaaattcttcccgcaagagtgaatgcggttacctacactccagattactgaccactggaggcagacactatggcgaacagcatcacggcggatgagattcgggaacagtttagccaggcaatgagtgccatgtaccagcaagaagttccgcaatatggcacgctgctggaactggtagctgatgtgaatctggctgtgctggaaaacaatcctcaactgcacgaaaaaatggtaaatgcagacgagctggcgcgactgaatgttgaacgtcatggggcgattcgcgttgggactgcacaagagcttgctactcttcggcggatgtttgccattatggggatgtacccggtgagctattacgatctcagccaggcaggggtgccggtacatagcacagcatttcggcccattgatgatgcttctctggcgcgtaatcccttccgcgtttttacctccttactccgccttgagcttatcgagaacgaaattttgcgccagaaagcggcggagattctgcgtcagcgcgatatcttcaccccacgttgtcgacaactgttagaggaatatgagcagcagggcggctttaacgaaacacaggcacaggagtttgtgcaggaagccctggaaacgtttcgctggcaccagagtgcaacggtagatgaagaaacctatcgcgcattgcacaacgaacatcggttgattgctgatgtggtctgttttcctggatgccatatcaaccacctgacgccacgtacgctggatattgaccgggtgcagagcatgatgcctgaatgcggaattgaacccaaaattctcatcgaggggccgccgcgccgcgaggtaccgattttactacgccagaccagctttaaagcactggaagagacggtgttgtttgcggggcagaaacagggcacgcataccgcgcgctttggtgaaattgagcagcgtggcgtggcattaacgccgaaagggcgacaactgtatgatgatcttctgcgtaacgctggaaccgggcaggataatctcactcaccaaatgcatttacaggaaaccttccgcacttttcctgacagtgagtttttaatgcgtcagcaagggttggcatggttccggtaccgtctgacgcctagcggtgaggcgcatcgtcaggcgattcatcctggagacgatccacagcccttaattgaacgtggttgggtagtggcgcaacccatcacctatgaagatttcttgcccgttagcgcggcggggatcttccagagtaatctgggtaatgaaacgcagacacgcagtcacggtaatgccagtcgcgaagcatttgagcaggcgttgggttgtccggttttggatgagttccagctttaccaggaagcggaagaacgcagtaaacgtcgctgtggtttgctttaaaatctgaccatccgcctttgcaaaaatttgcctgattttacaaacgaatcaggctcatcccatcgacataaaaaaaatgccgatttatgcatattctctcagttcaacaattggattattaataaatattgtctagagtgagcggtcataaataagcactttcttgccgctgaaaacgaccagcgcgggaccattcacaacaccagaaggactcactttcaggtatggatcgtagacgatttattaaaggttcaatggctatggccgccgtgtgcggtaccagcggcattgcttctcttttttctcaggcggcattcgcggcagattctgatattgccgacgggcaaacccagcgttttgacttctccattctacagagtatggcgcacgacttagcgcaaacagcgtggcgtggtgcgcctcgtccgttacctgacacgctggcgacaatgacgccgcaggcttataacagtattcaatacgacgccgaaaaaagcctctggcataacgttgagaaccgtcaactggacgctcagttcttccatatgggaatgggattccgtcgccgcgttcgtatgttttctgtagatccagcaacacatctggcgcgtgaaattcactttcgcccggagttgttcaaatacaacgatgcaggtgttgatacaaaacaattagaagggcaaagcgatctcggctttgccggttttcgcgtgtttaaagcccccgaactggcgcgccgtgatgtagtaagttttctcggcgcgagttatttccgcgccgttgatgatacatatcaatacggtttgagcgcccgcggcctggcgatcgacacttacaccgacagtaaagaagagttccccgactttaccgccttctggtttgatacggtaaaaccgggggcaactacctttaccgtttatgcgttgctcgatagcgccagcattactggtgcctataagttcactatccattgtgagaaaagtcaggtgattatggatgtggaaaatcacctgtatgcgcgcaaagacattaaacagctgggcattgcgccgatgaccagtatgttcagctgcggtactaatgaacgtcggatgtgcgatacaattcatccgcaaattcatgactctgatcgtctgtccatgtggcggggcaacggcgagtggatttgccgtccgctgaataatccgcaaaaattgcagttcaatgcttacaccgacaacaacccgaaagggtttggtttattgcaactggatcgtgacttctcccattatcaggacattatgggctggtataacaaacgcccaagtctgtgggtggaaccgcgtaacaagtggggtaagggcaccatcggcctgatggaaatcccaacaacgggcgaaacgctggataacattgtctgcttctggcagccagaaaaagctgtaaaagcaggtgatgagtttgcattccagtatcgtctgtactggagtgcgcaaccgcctgttcattgcccattagcgcgcgttatggcgacgcgtaccggcatgggcggtttcagcgaaggttgggcgccaggtgaacactatcccgaaaaatgggcgcgtcgttttgccgtcgatttcgttggtggtgatctgaaagctgccgcgccaaaaggcattgagccggtgattacgctttccagtggggaagcgaagcaaatcgaaattctctatattgaacccatcgatggttatcgtattcagtttgactggtatccgactagcgactccactgatccggtcgatatgcggatgtatctacgttgtcagggggacgctatcagtgaaacatggctgtatcagtatttcccgccagcgccggataaacgtcagtatgttgacgaccgcgtgatgagttaatcgttttttcttcggcaccttcttcgggaggtgccgtctggttaaacacgatcccgctcgcatttttccctaagttaaatgagtaatctgatggtgtgtatttcagatacaccttgtcagccactaacagggagtgcgtatgtttccagaataccgagatttaatatcccgtctgaaaaacgaaaatcctcgctttatgtccttgttcgataaacacaataaacttgatcatgaaattgccagaaaggaaggttccgacggtcgagggtacaatgcggaagtggtccgcatgaaaaaacaaaagctacagttaaaagatgagatgctcaaaatcctgcagcaggagagcgtcaaagaggtgtaaactttcctaagccgccagccaggcggcttttttaacaactgcatggattgactggagataagatgactgaaacgataaaagtaagcgaaagtcttgaattacatgctgttgcagaaaatcacgtcaaacctctttatcagttaatctgtaaaaataaaacctggttacagcagagcctaaactggccgcagtttgttcaaagtgaagaggacacgcgaaaaacggtgcagggtaatgtgatgttgcatcaacgcggctatgccaaaatgttcatgattttcaaagaagatgaacttatcggcgttatcagctttaatcgtattgaaccactgaataaaaccgctgaaatgggctactggctggacgaatctcatcaggggcaggggatcatttctcaggcgctgcaggcattgattcatcattacgcccagtctggtgaacttagacgcttcgtgatcaaatgtcgggtggacaatccgcaaagcaaccaggtcgctttgcgcaatggttttatccttgaaggttgcctgaaacaggctgagttcctgaatgatgcctatgatgatgtgaacttatacgcgcgtattatcgatagtcaataatcacaataaccctgccagcggcgttcgcgtaatgcgctcctcgccgttaatgacttttggaccacggacatgaaccgtgtcgccatcaaaggcttcaacgacggcgtggtcggttaactccacatggttttcaattatcaccgcacctgtaatacggctctcaccttgtatgacaacgtgctcgtcgagcagaatcggtccgccacgtaccacggcatttccgccaaccaagacatgatgttttaacacacaattaccttccacaatggcatattccgccacctggctactgtaatgaatcgtcggaatggcatcttcttctatgccagctttcacctgcgcgtgaccgtagactttagcgcaatcgcatagccagacattgttctcttcattaccttcaatactggcaaaatcaaaaacttcggcgcgatgttcaataaaagcataccggacgacggcatcgccataaatttgtgcctggtggacaatacggctggcgctaacccttgcgcgatcataaatttggagcaggagttgatggtcgggcgttaagccttgtgcggcgacgatcatagaatgttgatcaattaaggcgtgaccaaatattctacattgcccgtaaactaaactgtcatgaatggtgacgctgtcacttatatatgcaccctggctgatttcactattatcgatccagacgttatccgttgcgtaaacctctccccacagcacgctggtgccggtgatacgcgtattaccggaaatcaccgctccgccgaacgcaatagcattctggtcgtaaatccagcaatttccttcttgtgctaacaccgtttcgcgatcgatccagccgccagcggttcctgctatcacatcgttaaaatcgctaatggcgataatctgccgtaataacacattttttttagtgccatcttcctgataactaaaggctcgctgttcttcacttagacgatatttgcgcatagcgttttcccacaggtgacttactataaccgtagcaaattctgcggctctggctatgctcgagaaaattccataaaatgcatttcaaatatactttataaattaaacaaaatgagtaagaagatgcagagcgataaagtgctcaatttgccggcaggctactttggtattgtgttggggacgatagggatgggatttgcctggcgctatgccagccaggtttggcaggtcagccactggttaggggatgggctggtgattctggcgatgatcatctggggattattgactagcgcatttattgcccgactcatacgctttccgcatagcgtgctggcggaagttcgccatccagtgctgagcagttttgtgagtttgtttccggcaacgacgatgctggtggcgattggttttgttccgtggtttcgcccactggcggtgtgcctgttcagttttggtgtcgtggttcagttggcttatgccgcctggcaaactgcgggattatggcgcggatctcaccctgaagaagctaccacgcctggactgtatctgccgacagttgccaacaactttatcagcgcaatggcctgtggtgcgttgggctacaccgacgccggtctggtgtttttaggcgcaggcgttttcagttggctaagccttgaaccggtgatcttgcagcgtctgcgcagtagcggagaattacccacggcactgcggacaagtctcggcattcagctcgctcctgcgctggtggcttgtagtgcctggctgagcgtcaacggcggcgagggtgacacgctggcgaaaatgcttttcggttatggactgctgcaactgctgtttatgctacgtctgatgccatggtatctctcccagccatttaatgctagtttctggagtttcagcttcggcgtatctgcactggcaaccaccggtttgcatctggggagtggcagcgataatggatttttccatacgctggcggtgccgctgtttatctttaccaattttattattgcaatactgctcatccgtacttttgcgcttctgatgcagggaaaattgttagtcagaaccgagcgcgccgttttaatgaaagcagaggacaaagaatgatcattcgtgacgaaaactattttactgataaatatgaattaacccgcacacactctgaagtactggaagcggtgaaagtggttaaaccgggtaaaacgctggatctgggctgtggcaatggtcgtaacagtctttacctggcagccaatggttatgatgttgacgcatgggataaaaatgccatgagtatcgccaacgtcgagcgcattaaatccattgaaaatctggataatttacacacccgagtcgttgatctgaataacctcacatttgatagacagtacgattttattcttagcactgtggtgctgatgttccttgaggctaaaaccatccccgggttgattgccaatatgcaacgttgcactaaacctggtggttacaacctgattgtggcggcgatggataccgctgattatccatgtaccgtcggcttcccgtttgccttcaaagagggagaattacgtcgatattacgaaggctgggagagggtgaaatacaatgaagacgtcggcgagctgcaccgcaccgacgccaacggtaatcgtattaaactgcgtttcgccacgatgctggcacgtaaaaaatgacccggtaagcacaaaacgcgtgaaaattccccacgctgagatgatttactgttcttcttttcggtaagcatattttttatcgaagggatgtgaaattaatcacagtagtcgaagtttttagcagcttaacttactgaaatttaagtactgatgattgacttagcccctttttcggcattgactatgtcgtctgaaaaggggctgaaaaatttattttcaccaacactttttttgccacaacacgaagcggcgctttttgctataacttagaaagtaatataatcatctcaggaaactattcatgcgtaccacaagttttgcgaaagttgcagctttatgcggcttattggctctgtctggttgtgcatctaaaatcacccagccagataaatattctggttttttaaacaattactctgatttaaaagaaacaaccagcgctacaggtaaacctgttttacgttgggtagacccgagttttgatcaaagcaaatatgacagcatcgtctggaacccaatcacttattatccggtaccgaaaccgagcacccaggtagggcagaaagttctggataaaattttgaactataccaacaccgaaatgaaagaagcgatagcgcagcgtaaaccactggttaccaccgctgggccgcgtagtctgattttccgtggggccattaccggtgtagataccagcaaagaagggctgcaattctatgaagtggttcctgttgcattagtggttgcggggacgcaaatggctacaggccaccgtaccatggatactcgcctctattttgaaggtgagctgattgatgcagcgactaataaaccggttatcaaagtcgttcgtcagggcgaaggtaaagacctgaataacgaaagtacgccaatggctttcgaaaatattaaacaagttattgatgacatggcgaccgatgccaccatgtttgacgttaacaaaaagtaattccagacgcgccatcgttagatggcgctttttatccggtgcgccgtaaaaccccatccttcagggcggggatataaggcgcggttttccacctgaccaggtgtttgctgttgttcaatgtattggcggatgacggatattggcgcacctccgcagctactggcaaaatagccaggactccacaaaacgcctttgtagtaatacctgaatgcaatatctggtcgatctcgtcgcagtcacctacccgatacgcctttgaggctgtttaccagactggatatcgccagtttgggaggatagttaattaacaaatggacgtgatctggttcgccatccatttcaaccagttcagcttcaaaatcagcacatacatttgaaaagtaagtgcgtagtttttctgtcgcgtcatggtcaaaaatctggcgtcggtatctggtgacaaagagcaggtgaacatgcatcaggaaaacacaatgccttccacgccggatatcggtttcttttttcacagaccaaagtatcatttgacctgtgaaacgattacaggcatttaaattccagttaagacccggtggtcaacaggagtgtgaaatgaggcgcttcgcaggcgcatgtcgtttcgttttcaatcgtgctctggcacgtcagaatgagaatcatgaggccggtaataaatacatcccttacgggaaaatggcttcctggctggttgagtggaaaaatgccactgaaacgcaatggcttaaagattctcccagtcagccattgcaacagagtctgaaagaccttgagcgggcttacaaaaacttcttccggaagcgggctgcttttccccgattcaaaaagcggggacagaatgatgcattccgctacccgcagggcgttaagctcgatcaggaaaacagccgtatttttctgccgaaactgggctggatgcgctaccggaacagccgtcaggtcacgggtgttgtgaaaaatgtcactgtcagccagtcctgcggtaagtggtacatcagtattcagacagaaagtgaagtaagtactccggttcaccctagtgcaagtatggtcgggctggatgctggcgtggctaaactcgccacgctgagtgatggcacagtctttgagcctgtaaacagttttcagaaaaaccagaagaagctggcgagacttcagcgacagttaagccgcaaggtcaaattcagcaacaactggcaaaagcagaaacgcaaaatacagcgactgcattcctgtatcgcaaatatccgcagggactaccttcacaaagtcacaacggccgtcagcaaaaaccacgcaatgatagtcattgaggatttgaaggtcagcaacatgagtaagagtgcagcgggtacggtcagccagccggggcgcaatgtccgggcaaaaagtggtttaaaccgtagcatactggatcagggctggtatgaaatgcgccgccagcttgcgtataagcagctctggcgtggcggtcaggtgcttgctgttccgccagcgtatacaagccagcgttgcgcgtactgtggtcatacagcgaaagagaaccgcctgagtcaaagtaaattcagatgccaggtatgtggatatacagcgaacgccgatgtaaatggcgctcgcaacattttagcggcggggcacgccgttcttgcctgtggagagatggtgcagagtggccgcccgttgaagcaggaacccaccgaaatgattcaggcgacagcctgaacgtagcagggatccacgtccttcagggcgtggaggatgtcaatatcggtttctgtcagcgattaaattcaacaccacgtaacaaacgcctccggcaattaatccccaaaacgcagaaccaatcccgaccagcgtcaatccacttgccgttaccagaaatgccaccaccgccgcgtctcgctcacgctcattatgcagcgcctgatacaaactgccgccgatggtacttaacagcgccagacctgccagcatctggatccaacttacgggcagggcagccatcatcccggtaatggcactaccaaacagacctgcgagcaaatagaaaatgcctgcaacggcagcggccagccaacgttgatctttatccggatgcgcttccgggctttggcaaatagccgcggtgattgccgcaataccgacggaataaacgccgaaaggggaaaaaaccagtgccagcaatccagtaaatacaattaatgggctaacaggagcgctatatccagctgctttcattgctgcgatacccggtgcgttttggcttgccatcgtcaccagaaaaagggggagtgcaacgctcaggctgtgagcaaagctaaaatcaggggtaatataagtggggagaacgggtttaaagacaacatcagttgtgacaacgtcaccttgcgcgatgacgatcacgatcccaataatcatcgcggcaattaccgcatagcgcggcgcaacggccttggttgccagccataccagcaacatacttccacacaacgtaaattgaccgtccagactggcaaacgcctgtaaaccaaagcgtaataaaatcccggcaagcattgccgccgcaaggctgtgcggaataatgcgcatcagacgagcaaagagtcccgttatgccgcagaggactattagcgcgttggtgacaataaaaacgccgatggcttcgttaagtgttagtccctgcaatccggtgaccaacaaagccgcgccaggcgtactccatgcggtgagaacaggtacgcgataccataatgtcagagtcagcgtactgacgcccattgccagccccagcgccgtcatccagccagagatttgtgcagtggtggctccggcgacaatcgctgcttgccagattattgccgcactactggcgtagccaattaataccgccagaaaccccgccagtagcgtgggtggaggaatagaaaacagacgcatagtcacctcgtgcgttatagcgtacaggcaccgtagcatttgtccgttataacgcacaagtgataaacttccgttttgccggaggagtcgcatggaaaatctcgctcgctttttatccaccacacttaaacaactacgccagcagcgcggctggagtcttagccgactggcagaagcgacgggcgtttctaaagcaatgttagggcagattgagcgtaatgagtccagtccgacggtcgcgacattatggaaaattgccaccgggttgaacgtaccatttagtacatttatttctccgccgcagtccgctacgcctagtgtttatgatccacaacagtaggcgatggtgatcactagcctgtttccttatgatccacaactctgctttgaacacttcagcattcagatggcatctggtgcaataagcgaaagcacgccccatgagaagggggtaatcgaacatgtcgtcgtcattgatggacaacttgatctgtgcgttgatggggaatggcagacccttaattgtggggaaggcgttcgatttgctgcagacgtcacgcatatctatcgtaatggtggggagcaaaccgtacattttcattccctcatccattacccgcgcagttaagcgggaaaactatttcgcaacgtcgcgcttgtggctaaaatagccgccatttttcagctactggataagaatgtgaccgtatcttctcatcgacttgaactgttaagcccggcacgcgatgccgccattgcccgcgaagctattttgcacggtgccgatgctgtttatatcggcggccctggttttggtgcccgtcataatgccagtaatagcttgaaagatattgccgagctggtgccgtttgcccatcgttatggtgcaaaaattttcgtcacgcttaacaccattttgcatgatgatgagctggaacccgcgcaacggctgattactgacctctaccagaccggtgtcgatgcgctgattgttcaggatatggggattctggaacttgatattccgccgattgaactgcacgccagtacgcagtgcgacattcgtacagttgaaaaagcgaagttcctctctgatgttggcttcacgcagattgtgctggcgcgagagctgaatcttgatcagatccgcgcgattcaccaggctacggacgcgaccattgaattctttattcatggggcactgtgcgtggcctatagcggtcagtgctacatttctcatgcgcaaacagggcgtagcgccaaccgtggcgattgcagccaggcgtgccgtttgccatacacattgaaagacgatcaggggcgggtggtttcctatgaaaaacatctgctgagcatgaaagataacgatcagactgccaacctcggcgcgctgattgatgctggtgtacgctccttcaagattgaagggcgttacaaagatatgagctacgtgaagaatatcaccgcccattatcgccagatgcttgatgccattattgaagaacgtggcgatctggcgcgcgctagtagtggtcgtactgaacatttctttgttccaagcacggaaaagactttccaccgtggtagcacagattattttgtgaatgcccgtaaaggcgatattggcgcgttcgatagcccgaaatttatcggcctgccggtaggcgaagtagtgaaagtggcgaaagatcatctcgatgttgccgttaccgagccactggcaaatggcgatggcctgaacgtgttgattaaacgtgaagtcgtcggttttcgtgccaatacggtcgagaaaaccggagaaaatcagtaccgcgtctggcccaatgaaatgccagcagatttgcacaaaattcgtccacatcacccactaaaccgtaatcttgatcataactggcagcaggcactgacaaaaacctccagcgaacgtcgggtggcggtagacattgaactgggcggctggcaggaacaactgattctgaccctcaccagtgaagagggtgtcagcatcacgcatacgctggacgggcagttcgacgaagccaataacgccgaaaaagcaatgaacaatctgaaggatggtctggcaaaactggggcaaaccctctattacgcccgcgatgtgcaaattaatttgccgggggcgctgtttgtaccaaacagtctgttaaaccagttccgccgtgaagctgctgacatgctggatgctgcgcgtcttgccagttaccagcgcggcagccgtaaaccggttgctgatcctgcgccggtttatccgcaaacgcatctgagtttcctcgcgaacgtatacaaccagaaagcgcgtgaattttatcatcgctatggtgtgcagctgattgacgcggcgtatgaagcacatgaagagaagggcgaagtcccggtgatgatcaccaagcattgtctgcgctttgcctttaatctgtgcccgaaacaggcgaaaggcaatatcaaaagctggaaggcgacgccaatgcaactggttaacggcgatgaagtattaacgctaaagtttgattgccgcccatgcgagatgcacgtcattggcaaaatcaaaaatcacatactgaaaatgccgttaccgggaagcgtagtggcatccgtaagtccggatgagctgctgaaaacattgccgaagcgaaaagggtaaaacgccagttttctggttactcacaacttattgaatctgcatgatattgcctgccgggtaaggcgttacgccgcatccggcatcaaatgactcaacgttgtcccgcttctggtttgcggcttttttgccagtaaaaatgctcgcgcaaaccttccgcgctctcttccgccacagcacgcaattcatcgctgtccgcttcatgacgcagctgatgatccacattctttacccacacaaattcatgtcctttgtgccctgccatgagttgtccactaaacagagcacacgttaataagacaacgcttaacgccttcgtaaacatcctgccacctttttcttaccttttgccgctatgatgccgatcgtttcttgaggttattattcagttttgcaaattagcgcaaagaaattctggaatcttccttcctgattttgcattgcattctgccgttgcggcgatttagtgctattttcgagcaaattacacacggaggtaaacactaatgtttactttgttgatatactcagcggcagggaggcgatgtgaaacaaagcgagttcagacgttggctcgaatctcagggcgtcgatgtagcgaatggcagcaaccatttgaaactcaggtttcatgggaggcgcagtgtcatgccgcgtcacccctgcgatgagattaaagaaccattgcgtaaagcaatcctgaaacaactcggtttgagttaatcgccaattaaaaaggttaatgacatgcgagagacagtcgaaattatgcgttatcccgtcactcttacacccgcgccggaaggcggttatatggtttcttttgtggatatccctgaagcgttgacccagggcgaaactgtcgctgaagcgatggaagcggcaaaagatgctttactgaccgcatttgatttttattttgaagataacgagcttatccctttacctagcccattaaatagtcacgatcactttattgaagtacctttgagcgtcgcctctaaggtattgctgttaaatgcttttttacagagtgaaatcactcagcaagagttagccaggcgaattggcaaacctaaacaggagattactcgcctatttaacttgcatcatgcgacaaaaatcgacgccgtccagctcgcggcaaaggcgcttggcaaagagttaagcctggtgatggtttaattacagttaacgaaaagttgtcatttttaacaactgatatagactgccgaatcatctgcacataattacgattcgataatgaaaaaataccagcagcttgcagaacaattacgcgagcagattgcgagcggtatctggcaacccggcgatcgtttgcctagcttgcgtgaccaggtggcgcttagtggcatgagctttatgactgtcagccatgcctatcagttgctcgaaagtcagggatatattatcgcacgaccgcagagcggttattacgttgcgccacaggcaataaaaatgccgaaagcgccagtcattccagtcactcgagatgaagcagtcgatatcaacacttatatttttgatatgttgcaggccagtcgcgatccgagcgtcgttccgtttgccagcgcctttcccgacccgcgacttttccccctccaacaactaaaccgcagcctggcgcaggtaagcaaaaccgccacagcgatgagcgtgattgaaaacttaccgccaggaaacgcagaactgcgtcaggctattgctcgtcgctatgccttacagggcatcaccatttctcctgatgaaattgtcattactgccggggcgttagaggcattaaacctcagtttgcaagcggtaactgaaccgggcgattgggtgatagtagagaatccttgtttctacggtgcgttgcaggcgctggagcggctacggctgaaggcgttaagcgtggcgacggatgttaaagaagggatagatcttcaggcgctggaactggcgttgcaggagtatccggtgaaagcgtgctggctgatgactaatagccagaatccactcggatttaccttaacgccgcaaaaaaaagcacaactggtggcgttgctcaatcagtacaacgtaacgctgattgaagatgacgtttacagcgaactttattttggacgggaaaaaccgctgcctgcgaaagcgtgggatcgccacgatggcgttttgcattgctctagctttagcaaatgtctggtgcctggttttcgtattggttgggtcgccgccggaaaacatgcacgtaaaattcaacgcttgcagttgatgagtacgctttccaccagcagtccgatgcaacttgcgctggtggattacctttccacgcgccgatacgacgcccatcttcgtcgcctgcgtcgccagcttgcggaacgtaaacaacgtgcctggcaggcactgctgcgttatctgcctgcggaagtgaaaattcatcataatgacagtggttactttctctggttggagctccccgagccgttagatgccggcgaattaagcctggcggcactgacgcatcatatcagtattgcgccgggtaaaatgttttctaccggtgaaaactggagtcgttttttccgttttaataccgcgtggcagtggggagagcgtgaagaacaggcggtaaaacaattaggcaaacttattcaagaacggctgtaatagcgtttaatttaattcctcttagattgggtaatatgaatttcgaatagcagtcatatttcctaactccttgactatactccagaagataaccttacagacggcataatgcgcggtagctcacaacctgaataaattttctcaggggcgaaggtgtgcctgcaagccgccgtctatggttaaacaaggagatatttttacggcacggcggctgaacaattaattacgacaggagtaagaccttatgagcaagacatttgcccgcagcagcctgtgtgcgctcagcatgacaataatgaccgctcacgccgccgaaccgcctaccaatttagataaaccggaagggcgactggatattatcgcctggccgggatacatcgaacgcggacaaactgataaacaatacgactgggtaacgcagttcgaaaaagagacaggctgcgcggtgaatgtgaaaaccgccgcgacttccgatgaaatggtcagtctgatgaccaaagggggttacgatctggttacggcatccggcgatgccagcctgcgtttgattatgggtaaacgcgtgcagccgattaataccgcattgattcccaactggaaaacgctcgatccgcgcgtggttaaaggcgactggtttaatgttggcggcaaagtttacggcacaccttaccaatgggggccgaacctgctgatgtacaacactaaaaccttcccgacgccgccggatagctggcaagtggtttttgttgagcaaaatctgccggacggcaagagcaataaaggccgcgttcaggcttatgatggccctatctatattgcggacgctgcgttgttcgttaaagccactcagccgcagttgggcatcagcgatccgtatcaactcaccgaagaacagtaccaggcggtgctgaaagtgctgcgcgctcaacacagtttgatccatcgctactggcatgacactaccgtgcaaatgagcgatttcaaaaacgagggtgtggttgcttccagtgcctggccctatcaggccaacgccctgaaagccgaaggccagcctgttgctaccgttttcccgaaggagggtgttaccggttgggctgataccaccatgctgcatagcgaagcgaaacatccggtttgcgcctacaaatggatgaactggagtttaacgccaaaagtgcagggcgatgtggcggcctggtttggcagcttaccggtagtgccggaagggtgtaaagccagtccgttattaggcgaaaaaggttgtgaaaccaacggttttaactatttcgacaaaatcgccttctggaaaacgcctatagcagaagggggcaagtttgttccctacagtcgctggacgcaggattacattgccattatgggcggtcgctaacttcgctggggtgctttatgacgtacgcagtggagtttgacaacgtcagccggttgtacggtgacgtgcgcgcagtagatggcgtcagtattgcgataaaagatggtgagttcttctctatgctggggccgtccggctccggcaaaaccacctgcctgcgcctgattgctggcttcgaacagctttccggcggggctatctctatctttggtaaacccgccagcaatctgccaccgtgggagcgggacgtgaatactgtctttcaggactacgcgctatttccgcatatgagcattcttgacaatgtcgcctatgggctgatggtcaaaggcgtgaataaaaagcagcggcacgcaatggcgcaagaggcgctggagaaagtggcgttggggtttgtacatcaacgtaaaccgagtcaactttctggtggtcagcgccagcgggttgctatcgccagagcattggtgaatgaaccgcgcgtattgctgttggatgaaccgctcggcgcactggatctcaaattgcgtgagcagatgcagctggaactgaaaaaactgcaacagtctctcggtatcacttttatcttcgttacccacgatcagggcgaagcgttaagcatgtccgatcgtgtggcggttttcaataatggacgcattgagcaggtcgattccccgcgcgatctctatatgcgcccgcgcacgccgtttgttgccgggttcgttggtacaagcaatgtttttgatggactgatggcagagaaactttgtggcatgacgggaagcttcgccctgcgaccggaacatatccgcctcaacacccctggtgaactgcaggccaatggcacgatccaggcggtgcaatatcagggcgcggcaactcgttttgaactgaaattgaacggcggtgaaaaactgcttgtgagtcaggccaatatgacaggcgaagaactgcctgccacgctcacgcccggacaacaggtgatggtttcctggagccgtgatgtgatggtgccgctggttgaggagaggtgaatggcgatgaatgtattgcaaagtcctagtcgtccaggtctgggtaaggtgtccggtttcttctggcataatccggggctggggctgtttttactgctgcttggcccgctaatgtggtttggcattgtctatttcggcagcctgctgacactgttatggcagggattttatacttttgacgatttcaccatgagcgtaacgccggaactgacgctggcgaatatccgtgcgctgtttaatccggcgaattacgacatcattctccgcacgctgactatggctgtggcagtcactatcgccagcgccattctggcttttccaatggcgtggtatatggcgcgctataccagcgggaaaatgaaagcgtttttttatattgcggtaatgttgccgatgtgggcgagctacattgttaaagcctatgcctggacgttattgctggcaaaagatggcgtggctcagtggtttttacaacatcttgggctggaaccactgctgactgcgttccttacattacctgcggtgggcggaaatacgctgagtacttccgggctggggcgctttctggtgtttctctatatctggttgccgttcatgatcctgcccgttcaggcggcgcttgagcgtttgccgccgagtttgttgcaggcgagcgctgatctcggcgcacgtccacgacaaacctttcgctatgtggtgctgccgctggcaatcccgggtattgccgctggctctatctttaccttcagtctcacactgggcgattttatcgtcccgcagctggttggtcctccaggatattttatcggcaatatggtttattcccagcagggggcgattggcaatatgccgatggcggcggcattcaccctggtgccgattattctcatcgcactgtacctggcgttcgtgaaacgtctgggagcgttcgatgcactctgaacgcgcaccgtttttcctcaaactggcggcctggggcggcgttgttttcctacattttcccatcctgataatcgccgcctatgcgtttaacactgaagatgcggcgtttagttttccaccgcagggcctgacgctgcgctggtttagcgtggcagcacagcgtagtgatattcttgatgccgtgacactgagtcttaaagtggcggcgctggcgacattaattgcgctggtgttagggacgctggcagctgccgcgctgtggcgacgagactttttcggcaaaaacgccattagcctgttactgctgctgcccattgcgctgccgggcattgtcactggtctggcgttattaaccgcctttaaaaccatcaatctggagccgggatttttcaccatcgtggtcggtcatgcgactttttgtgtagttgtggtgtttaacaatgtcatcgcccgttttcgccgcacctcctggagtctggttgaggcgagtatggatcttggggccaatggctggcaaaccttccgctacgtagtgttgccgaatctcagtagcgcgttactggcaggaggaatgctggcgtttgccttgagcttcgatgaaatcatcgttacgacctttacggcaggtcatgaacgaacgttaccgttgtggttgctcaatcagcttgggcgaccgcgtgatgtaccggtaactaacgtggtggcactgctggttatgttggtaacaaccttgccgatcctgggggcctggtggctaacccgcgaaggcgacaatggtcaataaccactgatacaggaatatgctatgcaacataagttactgattaacggagaactggttagcggcgaaggggaaaaacagcctgtctataatccggcaacgggggacgttttactggaaattgccgaggcatccgcagagcaggtcgatgctgctgtgcgcgcggcagatgcagcatttgccgaatgggggcaaaccacgccgaaagtgcgtgcggaatgtctgctgaaactggctgatgttatcgaagaaaatggtcaggtttttgccgaactggagtcccgtaattgtggcaaaccgctgcatagtgcgttcaatgatgaaatcccggcgattgtcgatgtttttcgctttttcgcgggtgcggcgcgctgtctgaatggtctggcggcaggtgaatatcttgaaggtcatactagcatgatccgtcgcgatccgttgggggtcgtggcttctatcgcaccgtggaattatccgctgatgatggccgcgtggaaacttgctccggcgctggcggcagggaactgcgtagtgcttaaaccaagtgaaattaccccgctgaccgcgttgaagttggcagagctggcgaaagatatcttcccggcaggcgtgattaacatactgtttggcagaggcaaaacggtgggtgatccgctgaccggtcatcccaaagtgcggatggtgagcctgacgggctctatcgccaccggcgagcacatcatcagccataccgcgagctccattaagcgtactcatatggaacttggtggcaaagcgccagtgattgtttttgatgatgcggatattgaagcagtggtcgaaggtgtacgtacatttggctattacaatgctggacaggattgtactgcggcttgtcggatctacgcgcaaaaaggcatttacgatacgctggtggaaaaactgggtgctgcggtggcaacgttaaaatctggtgcgccagatgacgagtctacggagcttggacctttaagcagcctggcgcatctcgaacgcgtcggcaaggcagtagaagaggcgaaagcgacagggcacatcaaagtgatcactggcggtgaaaagcgcaagggtaatggctattactatgcgccgacgctgctggctggcgcattacaggacgatgccatcgtgcaaaaagaggtatttggtccagtagtgagtgttacgcccttcgacaacgaagaacaggtggtgaactgggcgaatgacagccagtacggacttgcatctagcgtatggacgaaagatgtgggcagggcgcatcgcgtcagcgcacggctgcaatatggttgtacctgggtcaatacccatttcatgctggtaagtgaaatgccgcacggtgggcagaaactttctggttacggcaaggatatgagtctttatgggctggaggattacaccgtcgtccgccacgtcatggttaaacattaaggataatattgcagatcgtaagagtatgagatgatcttgcgtactgtcagagcactgatttctctgacagtacgtgctgcgtgcaaaatcactacatcaaataaaccagccaaatctcatagagataagagtaaacaaaccaacagcagcaaagaaatttatcagtactacagttctactggaaacattcatttttgccaccttttatcattgcccctatgtgtatagtacgggttaagaaaatccgcaataatactcattctgaagatggataagggcaagttgctgtttgatgattttttctcaaactggtgaaaaaacttgatgcacgtcaaaaaatgacgcatatttgcgcgcgttttattcatctggctggacgcccgtacatgtctctctatcaacacatgcttgttttttatgcggttatggcagcaatcgcatttcttatcacctggtttctttctcacgataagaaacgcatccgtttcttaagcgcctttctggtgggggcaacatggccgatgagtttcccggtggcgctgttgtttagtctgttttaaatcttactcactggcttgacggcaccacgcagacttatatcatttggatgaatcgataaatttcacaagtggctaaggagaaagtatgagccatctggatgaagtcatcgcgcgcgtggatgccgcgattgaagagagcgtcattgcccatatgaacgaattattaatcgccctgagcgatgacgcggagttaagtcgggaagatcgctacacccagcagcaacgtctgcgcacagcgatcgcccatcacggtcgcaagcataaagaagatatggaagcgcgccacgaacagttaaccaaaggcggcaccatcctctgattaaaaactgcgtctggctaccaaccaggcgccaaccacaagtaaaattgcgccacaaattgggccgaacaacgcccgtagtggtacgccatgactgcggaagatatccagcatcagaccgccaatcagctgactggcgaccagtacagcaatagttgtcgccgctcccacattctgatatccgctgatactggcgaagacaaaaaagcttcccagcaagccaggtataagtgtccaccagcgcacgctggacaccagttcgccaaaccccgccatgccttgtttaaaccataaaatagaaacaaagagcacaatccccaccagactgttcagcaacatggcgatgagaatggtagaggaggtctgggtgatgcgcaccatcagcgtgttctggacaaccagaccaattccggcggcaatcaaaaaagcaagggtgaggctctgattcatccaatcgcgtccggttcagtgcgctcgtcgagttgcaactgcataaatgtcagatccagccaacgaccaaatttagtgcctacctgcggcatttgcgcggtgacgacaaatcccaggctctggtggagatgcaggctggcctgattttggctttcgatcccggcgaccatgacatgcttcccgcaatcccgcgcttcatcaatcaatcggcttaacaatttacgccccagacctttgccctgatgatcgggatggacataaacgctatgttccacggtatggcgaaaaccatcgaaactacgccagtcgccaaagctggcatatcccgtcactacgccgttttcctcgctcaccagcactggataacctgctaaagtccgcgcttcaaaccaggcaatgcggttatcagcatccaccgtttggtcattccagatagccgccgtatacaacacggcgtggttataaatttccgcaatggcagcacagtcggctttgcgggcaaaacggatggacatgtctggcctcaataaaataatgatgatgatgttatcaatactatcgaaaacagcccgaagcaacggattcctcgatgaaattattgcgtgttgcagaggggatgtgacggctgcaaacaaaaccaatcccgtgagcctgctactattgatggattcatgccaaaagcacaggagagcattatggggcaacaaaagcagcgtaatcgacgttgggttctggccagccgtccacatggcgcacctgttccggagaatttccgtcttgaagaagatgatgtcgccacaccgggtgaaggacaggtgttactgcgcacagtttatttgtccctggacccgtatatgcgtggacgtatgagcgatgagccatcttatagtccgcctgttgatattggcggcgtgatggtcggcggtacggtgagccgtgtcgtggagagcaatcatcctgattatcagtctggcgactgggtgctgggctacagtggatggcaagactatgacatatccagtggtgatgatctggtgaaacttggcgatcatccgcaaaatccaagctggagcctgggtgtgctagggatgccaggctttaccgcttatatgggcctactggatatcggtcagcctaaagagggcgaaacgttggtggtagctgcggcgacaggaccagtgggggcgacggtggggcaaatcggcaaacttaaaggttgcagagtggtgggggtagccggtggcgcggaaaaatgccgccatgctaccgaggtgttaggcttcgatgtttgtcttgatcaccacgcggatgattttgccgaacaactggcgaaagcgtgcccaaaaggtattgatatctattatgaaaacgtgggcggtaaggtattcgatgcggtgctaccgttacttaatacatctgcgcgcattcccgtctgcggattagtgagcagctataacgctacagagctaccacccggtccggatcgtttacctctgttgatggctacagtgctgaaaaaacgtattcgcttgcaaggttttattatcgctcaggattatggtcaccgcatccatgagtttcagagggagatggggcaatgggtgaaagaggataaaatccactaccgcgaagaaattactgacggtttagagaatgcgccacagacgtttatcggcctgctgaagggtaaaaacttcggcaaagtggtgatccgcgtggcgggtgatgattaaagtttcaacggcggcgtaagccgccataaaaatccaggcaaaaagcttattttcagctttaattaactaaccacatcattgttctgctgctaataacaacaaaggtgagtggtttatgattattcactttaatacaccaggtgaattccttctgccatgcaggcagggttggacagaaaacacgcgaaggaattaaaatgcctggaacgggaaaaatgaaacatgtcagtttgactctgcaggttgagaacgacctgaaacatcagcttagtattggcgcattaaaacctggcgcacgcctgattactaaaaatctggcggagcaattaggtatgagtattacacctgtgcgtgaagcattattacgtctggttagcgtgaatgcgctttctgtcgcacctgcacaagcatttacagttccggaagtggggaaacgtcaattagacgaaatcaatcggatccgctacgaactggaattaatggcagttgctctggctgttgaaaacctcaccccgcaagaccttgcggaactccaggaattgctcgagaaattacagcaggcgcaagaaaagggcgacatggaacaaatcattaatgtaaacaggctatttcgcttagcgatttatcatcgcagtaatatgcccatcctgtgtgagatgattgagcaactgtgggtcaggatggggcctggtttacattatctctatgaagcgattaatccagcggaattacgggagcatatagaaaactatcatctgttactcgctgcgttaaaagcaaaagacaaagagggatgcagacattgtcttgctgaaattatgcaacaaaatattgctattttataccagcaatacaatcgttaaagtaaatgcccggcaaataccgggcatcaaggtaattactcaaatctccacgcaatattcatgccgacaccataatttcgtccggggctaggttcgtaatatcgcccgttactctcattgacaatgacagaaccaacgtattctttatcgaataaattatcgacacgaccaaataaatccacagttaaattgtggtaattgtatttatacccggtgaataagccgacgagagtataagacggcgcttttgccgtattttcatcatctgccataatatcgcccatataacgcgcttccgtgcctgcataccaaccatcttccggtacataacctatgctcgcaaagcccatattacgggcgatccctggcatccgattaccgttacaatcctgttcattgcaaacattgctgcgataggtcgcatcaagccaggtccaggacgcgtttacgcgaaaatctcctgcgaaacgttgatcccatgccagttcagcgccttgacgacgggtctttccggcatttttgtaagtcgtacgcccaccgctactgctatcgacaacaatttcatcatcagtgtcggtctgaaacaatgcgagactaagcagcccatcaccaatacgcgttttactgccgatctcaattgtatcgttggtggatggttttaaacctaagttcataccgctttgcccatcagcacgataagacagctcattaatcgtcggcgtttcaaaacctcgcccggctgccagatagatattccaggcatcggtcattgcatattttaagctaccggcaggtagccatttatgataactggcatcaccgctgtcatcgccgttacccggagtaacgtaatggtcgttggaatcaaaccacacggagctgtagcgcacgccagcatccaggctcagtttttcgctcagctgccactgcgtctgtaaatagggatcgatgttccacatcagattgcgttcgtcgcgacgcaactcacctttttgcccgtactccggcatgccgctattcaggcggaagttattgtagcccttgcggttttcactcatgttttcgtagttcaggccggtagtgaacgtgaccggaacgcccagttcaccacggtgtgtccagcggctgtctattccctggtaatggcgttgcagggtaatcacgccgcccgcatgactcgggttaagttgtggtgccatgggtatactctggtactgggtcgtttctcgctctccggcatacatcatcacactcatatcatcccggctactcaggctacgctcatagcgcaacccagcctgagtttgcttgatggtttttcgcgtgtcgtactgttctgcacgaggcgcttgttgtggattagccttccattctgctttggttagcccacctgggtcatctgctttgatatccacactattgaaaatcagacttaatttgctggcttcatcaatgcgtacgcccagtttggcattggctaaatttttctgtgcgccactatggtcacgatagccgtgggtcgtaaaacgcgtggtactgacggtgtaatcgacatcgccaggctgtgtgccgtctcccgttgcgcccgttgctttcagcccatagcgccagctgccaaaactgccgtagtaactactggcttcaatggttggtggctgttgtccggtctgggtggtgacattcattaccccaccagacgcgttgccatacagggcagagaaggggccacgcagcacttccacattttgcacactgcttaaatcgatgttggatgtttgcccttgcccgtcgggcatggtggcgggaataccgtccacatacaggcgaataccgcgaataccgtaagtggagcgggagccaaatccgcgaatgctcagctgtaaatcttgcgcatagttctgccggttttgtacctgcaaaccaggcacgccggtcagactttcggacaagttaatgcgcggtgttgccaggcgcatctcctcgccatccaccacgcttactgctgctggggtatccagttcactaaccacctgcggtgcggcactgacaatcatagtctgttcatcagcggcaaaaacaacgggggaaaggacaagcagtgcgggcaaaacggtctgtcggacggaaaaaatcttcatgaaaaaagccaggttaagaatgggaaaacgccgtcatggtaatgaaattgtaaatttatggaaaatgaaacggcacaatacgttaagtaattgagaaaattgtagtcgtaacggcaagaaatgctccacatttgagaaaataatgattaccattcccatttataacaagagcgtaacgatgattacgcttagcgaagcattgtgaagcagcaaaaatatcggttcatcaaagggagtcgtcatgcatttacgtcatctgtttagtagccgcctgcgtggtagtttactgttaggtagtttgcttgttgttagtagtttcagtacgcaggccgcagaagaaatgctgcgtaaagcggtaggtaaaggtgcctacgaaatggcttatagccagcaagaaaacgcgctgtggctcgccactagccaaagccgcaaactggataaaggtggcgtggtttatcgtcttgatccggtcactctggaagtgacgcaggcgatccataacgatctcaagccgtttggtgccaccatcaataacacgactcagacgttgtggtttggtaacaccgtaaacagcgcggtcacggcgatagatgccaaaacgggcgaagtgaaaggccgtctggtgctggatgatcgtaagcgcacggaagaggtgcgcccgctgcaaccgcgtgagctggtagctgacgatgccacgaacaccgtttacatcagtggtattggtaaagagagcgtgatttgggtcgttgatggcgggaatatcaaactgaaaaccgccatccagaacaccggtaaaatgagtaccggtctggcgctggatagcgaaggcaaacgtctttacaccactaacgctgacggcgaattgattaccatcgacaccgccgacaataaaatcctcagccgtaaaaagctgctggatgacggcaaagagcacttctttatcaacattagccttgataccgccaggcagcgtgcatttatcaccgattctaaagccgcagaagtgttagtggtcgatacccgtaatggcaatattctggcgaaggttgcggcaccggaaagtctggctgtgctgtttaaccccgcgcgtaatgaagcctacgtaacgcatcgtcaggcaggtaaagtcagtgtgattgacgcgaaaagctataaagtggtgaaaacgttcgatacgccgactcatccaaacagcctggcgctgtctgccgatggcaaaacgctgtatgtcagtgtgaaacaaaaatccactaaacagcaggaagctacccagccagacgatgtgattcgtattgcgctgtaatagatatggcgagggtgaaaacggtgagacttgcctgccttttatcacggcgtatccggcactttcgtcagtaatctgaatttgcccggcacgtagccgggcaattttgcaattaactcgccgtttcaggcttaaacacaatttcctgtttttcttcatcttcctcgacgactggcgcagtgctgtgaatttcagcaacgcgtttgcgcacaccaaaccagcctataaccagcaaaataccgataatcggcagcgccgcgatagtataagtcccgttcgggtaatcgaacgccatcagcacaaggacactcagtaaaaacagtaatgtcagccaggaagtgaagggcgcgccaggcagtttaaaactgacatccgctgctttgccttctttaatcgctttacgcaggcgcatctggcacacgatgataaacgcccaactagcgatgattcccaggctcgcgaagttcaacacaatctcaaatacgcggctcggcaccagatagttgaggaatacgccgacgacatacacaactagtgtcgccagaatcccggcatacggcacatgctgacgactcattttcgccataaaactcggtgcggaaccgcccatcgccatactgcgcagaatacgtccggtgcagtacagaccactattcaggctggagagggcagcggtcagcaccacaatgttcataatgctgccgatatatggcacacccagtttagagaaaaacgtcacgaacggactttgccccgcctgatacgcgctccacggcaataacataaccagcaacaccacggagccgacgtaaaacaggccaatacgccaaatcacactgttaatggctttaggcaccatggtctgcggatctttacattctccggcagctgtacccaccatttcaatggaggcaaaagcaaacactacgccctgaatcaacaccagcgcaggcagcaaaccgtgggggaagaagccgccattatcggtgattaaatgaaagccagtggtgttgccatccagcggctgaccactaccgaggaacactgtacccacgaccaaaaaggtcacaatggcgagcactttaataagcgcaaaccagaactccatctccgcaaaccatttcacaccgatcatattcatggtgccaacgatggtaagtgcagcgagcgcaaagacccactgcggcacgccgccaaacgcaccccagtaatgcatatacagagcgacggcggtaatatcaacaatccccgtcatcgcccagttgatgaagtacatccagccagcaacataagcggctttctcacccaaaaactcacgggcataagaaacaaaactgccactggaagggcggtgtagcaccagctcacccaatgcacgcagaataaaaaagctaaacaagccacaaattaaataaaccagtgccagtgcgggccccgccatttgcagtcgggctcctgcacctaaaaacaagccggtgccaatcgcgccgccaatggcgatcatctgcacctggcgattgcccatcgctttgtgatacccctcttcgtgggcattaagccagcggcgtttcgcggcgtgttgatcactagtgtcggtgtcgtgtttactcattgctctccctgattgctttaatgaaaaagtcatataagttgccatgaacaatgtttattcatcctggcgatgatagttatcaccattattctttatgggtataaaactatcggcgcagcatcctacccgttatcgataaacgatgcaaaacatccccttacaatcctgaaggggattaatacaactgacgaaaaaatgacaaatccttttgctggttaacctgtgtactgtcctacacttaatctttaaaagattgtgaggggcatatgattaaggtgtatggcgtacccggatggggctctacaatcagtgagctgatgctaacactggctgatattccttatcagttcgttgatgtcagtggttttgaccacgagggagctagtcgcgagttattgaaaaccctgaacccgttgtgtcaggttccgacactggcattggaaaatgacgagattatgacggagacagcggcgattgcattgatggttctcgatcgtcgcccggaccttgcgccaccggttgggcgcgccgaacgtcagctgtttcaacggctattggtctggctggttgctaatgtctatccaacattcactttcgccgattaccctgagcgttgggctcctgacgcacctgaacagttaaagaagaatgttattgaatatcgaaaaagcctttatatctggttgaatagccagctcactgctgaaccttatgcgtttggtgagcaactaacgctggtggactgttatctttgcactatgcgcacatgggggcctgggcatgaatggtttcaggataatgccacgaatatcagtgcgattgctgatgctgtatgtcagttaccgaaattacaagaagtattaaaaaggaatgaaattatttgagtgggataccagaagattatgttatttattattcagtaactttatccacaatgatgggcgtaattaattaaattcatggtatgttttttaatttatatcactctccttttcattcagcgtgtctatttcatttcctctgaaaagaaactaactattcacatcgtgcagatgtttcagttgttaagtcaggcattctataatctcaaaatgtttttaatgatggatatgctcggagttggagatgcaattaatattaatacaaataaaaatatccggcaggtatgctaaaaggataaatggcgttctctgtatttattcgcaattatctgtaggacaaatatggagagcttgatgagtcagagctaaaacagcaattgattaataaacatgttgatttattcaagaaaatggatgtattttaaatgttgattcttaatataacctaatcaatagattatcaagtgagagctacacattattggaggggcaggggaaaacaccattttgggaacaatgcatcaggtactcttaccactgaagcaagatcatccggcaccaggtggtggtgcagtgctttggaaatggtcccctcgggggagttgtcattattttctatgctatttgcttattatattcatcaggtgaatttaataaattcctaatttgaaatatccactattaagctagtgtttaacgacgttaagatggcaatgtgcagatcatgttatcagggtggggcggtagcgtatattccttatacaaaccatcattcatttcaatgattgttattgaattatttattgttgtgaataaaaagacattatgaatattggtttgactttgcatatcaggttttttattactcgctgtaatgtacgagcctgtcgtgaataacgtcgagaacccatccgttgcgtttgtgattattttgttgactaaacagacacccgtttctctgaagtaaaatcccagactaaatcatcacataaccatgacatttttctgatattccccggtaacgccagataacgatgccaaatttaccgttatgttcaatcaactccctggtccatgtcgatttatctaccacaatcgccacgcgtggaggttcaaactccaccggcattgaccaggctgcagccataatgttacgccgctgggattgctcatcgaaactggtgatcaagaccgttgggccatgatttaacagacggctggcatggtgtaattctatggggatgaatcggctcatggtatcgcctcgcgaagaaggtttttttaagcgtagtccgtaacgcaataagtaacgaaattaacgggattggcgatttgcgaacgtgatgcatgtccgcgatcgcacaaaatagccggtgcggcgtctattccaggttataagttgagaaaaccactaagggaaacgcctgatgacgcccattctgaatcactattttgcccgtattaactggagcggagctgctgcggtcaatattgatacgcttcgtgcattgcacctgaaacacaattgcaccattccgtttgaaaacctcgacgttttgctgccgagggaaatacagcttgataatcaaagcccggaagagaaactggtgatagcccgtcgtggcggttactgttttgagcagaatggcgtgtttgagcgggtgttacgcgagctggggtttaacgttcgcagcttgttagggcgcgtagtgttaagtaatccgccagcattaccgccgcgcacccatcgtttgctgttggtggaactggaagaggaaaaatggattgctgatgtcggtttcggtgggcagacgctaaccgcgccgattcgtttagtttccgatctcgtgcagaccacgccacacggagagtatcggttgttgcaggagggtgatgattgggtgttgcagtttaatcatcatcagcattggcagagcatgtaccgttttgatctctgcgagcagcaacaaagcgattatgtgatgggcaatttctggagcgcgcactggccgcagagccattttcgccatcatttgctgatgtgccgccatttgccggacggcggcaagctgacactgaccaattttcattttacccattatgaaaatgggcacgcggtggagcagcgaaatctaccggatgtggcgagtttatatgctgtgatgcaagaacagtttggtctgggcgtggatgatgcgaaacatggctttaccgtggatgagttagcgctggtgatggcggcgtttgatacgcacccggaggcgggaaaataatttatgtcaggttgccggatgcggcgtaaacgccttatccggcatacattagcccggttgtagacctgacaggcgaagcgcatcagacaacggtttcagagttcaattgcccattcggcatgaaacaaaatcaccgctgtgccactaatggtgactttttccggttggttatcacgaattgtcaccgtcacttcaatcataccgtcacgccccaatgcgcgcccctgatggcctttaacacgcaacacgttgccatcgtggggcaatacgttgtgatgtaccaaccatgcacccatcgggccattggcattgccagtcaccggatcttccacaataccaatcgcagggctgaacatgcgaccatcggtttcgtttttgcctgggcggatctggaacgggaagaaaccattgcagccaatctttttgctgatagcggtcagcgcattaaggtcagggctaagggcgtcgatatccacttccggtttcagtgggatcatcactttactgtgtcctgttgttgccacctgaattggcaagcctggcagaatatcgtcctcagtgagatgaagcgcgttgataatcgccgcacgtgtttcaccttccagcggtggctcaaagcccggcgtaccttgttccaggctaatacgataatcatcgttgtgcttttcgatagtcacgcgatgttttcctgccaggcttgtttgccagatcgtgcaatttcctaaacctaacaccttcgcacgtacatagtgcgcagctactgtcgcgtgaccgcaaatcggcacttcaaccgttggcgtaaagtagcggatgcgcacatcgctgtcgtcgctgtgcagcagaaaagcagtttcgctatggcctaactcgcgggcgataagctgcatttgcgcttcgctaagattatcggcggggaaaacaacaccggcagaattgccgcgaaacggttgactggtaaaagcatcgacgtggtacacctgcggtttcattaacgttctcctgtgactggagaactatcatagcctgcaagtggccggagagcgaagggctatccggccagggtgaaattatcgccggctacgcacaatttgatatcgacgagtaaagtactcaaacggcgcgctccacacatgcaccagtcgggtgaacgggaagagcaggaagatggtcattcccaacaccagatgcaggcggaagacgaacgctacgccgttgagcatctcactgcttccaccacggaaagtgacaatgctttgcgcccaacccaccagcttcatcatttcgctaccatcaggatactgtgcactaaacggtatggtacttagccccaacagacactggatcagcaaaatgctcatgatgatgatatccggcgtagtggaagtggcacgcacgcgctgatttgtcagcctgcgccacagcagtcctgcgccgccaatcaacgtcaacacaccgcaaataccgccgagcaccatcgccatgagttgtttcgctgccactggcaaaaaccacgcgtacatccagtgcggcgttaacatgccgaacaagtgcccgaagaaaatccccaaaatgccgatatggaacagattgctccatatcaccatcccgcgtttatcgagcatttgactactggaggcgcgccaggtgtactgcccgtagtcgtagcgcagccagctgccgaggaaaaacaccgtcgcacaaatgtacgggtagatatcgtaaaaaaagacgttcagatactgaatcatttcccacctcccgcactgatgtcgacatattgcggcgcgacatcctggctaaagcgtcgctgatattgattaagcgggctgctgtcacacgccgtggcgttatcttcaataaacttcacctgttcctcttcccacactgcatcaagcgcctggcgggtgtcatcgcgctcttcgctgtttacttgttttgtgacactgtcactactaagggagcttcccgccagttgcagcagagcatcaaacaacgcgtaccacggtgcctcgcgttgttttaagcgaccgccaagcagggcgaggatcggcgcaacattgagcaatccttctttcgcctgatcgtcaggcagtacgcttaaatactccagatacagcggtagataatcgggcagttcccgacaatccagctgcaggccgaccttttcatactccgccagcaggtccaccattgcctggccgcgatcgcgggactcggcatgaacatgttcgaacagcagcaggctcgtggtgcgcccgcggtcaaacacttcgcaccattcggcctgtttatccagcagcggcgcgttaagcaggttgtgggtgaaatccgtaagcatcggcgcgtcgcggcggatcaacgccagcgcgtcctccttgcattcccacaacagctcgtccggatactccatcaacaggccgatcactttgaggatctgcattattcgccctccgctttgtcgcgcacttcggtgatgttgatggcatcgatacggctactgttgaacaggttgaatttactgtcgctaccgtggcaaccgtcgccaaaggtaaaaccgcagccgttgcgttctgcgaaggcatcgcccgccatttcccgatggctggtcgggataacaaaacgatcttcatagttggcaatggcgagatagcgatacatctcttcgacctgggcgacgctcaggcctacttcgtcgatggcacgagtatcagtaacgccttccacggtttgactacgcatatagtggcgcatcgccatcatccgtttcagcgcccgcagtaccggaccggtatcgccggcactcaacatattggcgagatattgcaccggaatacgcaggctttcgatggcgggcagcacgccttcgcttttcggcaaaccgcccgcatctgcgtaggactgaatcggactcagcggaggaacgtaccagaccatcggcagggtgcggtattcagggtgcaacggtagtgccagtttccagtccatcgccattttgtagactgggctacgctgggcagcgtcaatcacattttgtggaataccttgtttcagggcttcctcgatcacactgggatcgtgtggatcgaggaacacttcgcactggcgttcatagaggtcaacttcgcgctcggtgctcgccgcttcctcgatgcggtcggcgtcgtaaagcagcacgcccagataccggatgcgacccacgcaggtttcactgcacacggtcggttgaccggactcaattcgtgggtaacagaagatgcatttttcactcttgccgcttttccagttgaagtagatttttttgtacggacaaccgcttatgcacaaacgccagccacggcatttatcctgatcaatcagcacaatgccgtcttcttcgcgtttgtagatagcgccgcttgggcaggtcgccacgcagctgggattgaggcagtgttcgcacaggcgcggcaggtacatcatgaaggtgttttcaaactgcccgtacatctccttttgcatggcctcgaagttgcggtcgcgggcacgtttttcgaactcaccgcccagcagttcttcccagtttggcccccagatcactttgtccatccgtttgccgtcaatcagactacgcgggcgagcagtaggaatatgtttgccttccggtgcgctatgcaaatgttcgtagtcgaaggtgaaaggttcgtagtaatcatcaatctgcggcaccaccgggttggcgaagattttggttattacgcccatcttgttgcccagacgcgggcgtatcttgccattcacatcacgcacccagccgccttgccactcttcctgatcttcccagtttttcggataaccaatgcccggtttggtttcgacgttgttaaaccatgcgtactccatgccttcgcgcccggtccagacgtttttacaggtcacgctacaggtatggcagccgatacatttgtcgaggttaagcaccatgccgacttgactacggattttcattttttcgcctcctgtacctgatcgcgaccttcatcatccagccagttaacgttcttcatcttgcggatcatgatgaactcatcgcggttgcttccgacggtgccgtagtagttaaagccccaggccagctgcgcgtaaccgccaatcatatgcgttggtttcgggcaaacgcgggtaacgctgttatgaatgccgccgcgcatgccagttacttcgctaccaggaatattcataatgcgttcctgggcgtgatacatcatggtcatgcccggcggtacacgttggctgaccaccgcgcgggcagtcagcgcgccgttggcgttgaatacttccacccagtcgttatcgacaatggtcagttctcgggcatctgtttcgctgatccagacaatcggtccaccgcgagagagcgtcagcattagcaggttttcactgtaggtactgtgaatgccccatttctggtgcggcgtcaggaagttaagtgctttttccgggaagccgtttggcggtatctggcgcatctcactgacgctacgggtgtcgataggcgggcgataagccaccaggctttcaccaaaagcacgcatccacggatgatcctgatagagctgctggcgtccgctcagcgtgcgccacggaattaactcatgaacgttggtgtatcccgcgttataggagacgtgatcgctttccagaccggaccaggtggggctggagataattttacgcggctgcgcctgaatatcgcgaaagcgaatcttctcgtcctctttgtgcagcgccagatgggtatgttcgcgcccggtgatctcgcccagcgcctgccacgctttgactgcaacatgaccgttggtttccggtgccagtgccagaatcacttcactagcgtcaatggcggtgtcaatcagcggacgcccctgtgccgggccatcacgcttggtgtaattgagtttgccgaggaaatcgatttcatcctgggtattccagctaatccctttaccgccattgccaagtttgtccatcaatggcccgaggctggtaaagcgttcatacgtagcagggtagtcgcgctccaccgccacaatattcggcgcggttttgcctggaatcagatcgcattcgcctttgcgccagtcgagcacttcacacggctgactgagctctgccggagagtcatgcagtaggggttgtaataccacgtcggtttctttgccaagatgacccacgcacacttggctaaatgctttggcgatacctttgtagatttcccagtcgctgcgactttcccacgccggatcgaccgccgcagaaagcggatgaataaacggatgcatatcgctggtgttcatatcgtctttttcgtaccaggtggcggtgggcagaacgatatcggagaacaggcaggtactggacatgcggaagtcgagcgtcaccagcaggtcgagcttgccttcaatcgctgcagtttgccactcgacttcttccggtttgatcccgtcgctggcaccgagttcctcgccctgaatcccgctttcggtccccagcagatacttctgcatatactcgtggcctttgccggaggagccaagcaggttagagcgccagacaaacaaattacgcggatgattgctgctgctatctggttgttcgcaggccatacgtaaatcgccgcttttcagcgcctgggcggtaaattctgtgggggataatccggccttgtcggcttcagctttaatcccgagcgggttacgccccagctgcggcgcagaaggtagccagcccatacgttcggcgcgaacgttgaaatcaatcagatgaccgctgtacttactggcatcggcgagcggactaagtaactcctgagcagagactttttcatagcgccattggctggaatgattgtagaaaaagctggtgctgttcatttggcgcggtggtcggttccagtcgagcgcaaaggccagtggcaaccagccggtttgtgggcgcagtttttcctggccgacatagtgtgcccagccgccaccgctttgcccgacacaaccgcagaagatcagcatattgatcatcccgcggtagttcatgtccatgtgataccagtggttaacacctgcgccgaggataatcatgctgcgcccatgcgttttatgggcggtatcggcaaattcacgggcgatggtttcaatatactggcgcggcacgccggtaatttgctcaccccaggctggggtgtacggtttgatttcagcgtaatctttcgcactgttttcatcttccagcccgcgatcgaggccgtaattcgccagtaccaaatcataaacgctgaccaccggacaggtgttgccatcgactaacgtcaggtttttaacgggcaattggcgcaccagcaccggattgtgttttacgctgcgaaaatgcggattttcaatgccgccaaagtaggggaaggccacgcctgcaacagcgtcatgttgaccgagcagggttaagctcaattcggtttccgtaccggcggcaatggattccagattccatttgcctttttctccccagcggaaaccaatgctaccgttcggcactaccaattcacctgcggtattaactgctacggttttccactgcggattgttgctttcgcccagtccatccaccaggtcagatgcgcggatcatgcgcccgggaacgtagctaccatcgtcgcgaggctccagcattaccagcatcggcatgtcgctgtagcggcggcagtagttgataaagtagtcgctgggattatcgagatgaaactcttttaaaatcacatggcccattgccatcgccagggcgctatcagtgccttgtttcggtgccagccactggtcgcacaatttggccacttcagagtagtcaggggtaatggcgatggttttagtgcctttgtagcgtacttcggtaaagaagtgggcgtccggcgtacgtgtctgcggtacgttagacccccaggcgatgatgtagctggagttataccagtcggcagattccggtacgtcggtttgctcgccccaggtcatcgggctggcgggcggcaggtcgcaataccagtcgtagaaacttaaacaggtgccgccaagcaggctcagataacgcgttccggcggcgtaagaaaccatgctcatcgccgggatcgggctgaaaccggcaacgcgatccgggccgtaggttttgatggtccagacgttagcggcggcaatcagctggtttagttcctgccagttggagcggataaacccgccgcgcccacgcacttgtttgtagctcaggcacttttgcggatcgttcataatgcttgcccacgccagtaccggatcgctgtgttgcttgagggcttcgcgccacagttcaatcagtcgtttacgaatgagcgggtatttcaggcggttagcgctgtaaagataccaggagtaacttgcgccacgcgggcagccgcgaggttcatgattgggcaggtcagggcgagtgcgcgggtagtcggtctgttggatttcccaggtcaccagaccatttttaacgtagattttccagctacaggagcctgtacagttaacaccgtgggtggaacgcacgattttgtcgaactgccaacgctggcgatagctgtcctcccagtcgcggttgctatgcatcacctgtccgtgaccatcggcaaaggtttcgcccttttgtttgaagtagcgaaagcgatccaaaagtttactcatgacatgactcctgctccaggaatgaattgggatctgatgccttgtcggatgcgacacggttgtacatcaggcatcgatctcttatttttggctgaacttccgccgaccataaaccagccaggtcagcagcacacaaacgatgtagaagattaaaaacactttcatcgcgccgaccggagagccggtcatattgaggctcatgccaaacgcctgcggaataaaaaagccgcccactgcgccaatggcactgataaagcccagagccgccgccgtttcggtgacggcttcttcatgagcttgctcatcactaccgcctttcatctttacccgataaatggttatctggcgaaagatgacggcgatcatctggaaagtagaaccacttcccagacccgcagtcagaaacagccccataaatacggcgtaaaaggcgatgaaattaccggagcctgtgcccggtaaggtaaggaacagcagggcactgaaaatcgccataaaaataaagttgatcaacgtcacccgcacgccgccgaacttatcggaaatagcaccaccaacgctccgcgcgatggcaccgataaatgggccaaagaacgccaggcgcagaatattcacatccgggaactgggtttttgccagcatggcaaaacccgcagaaaaaccgataaagctaccgaaggtggcaaggtaaagcaggctcagcagccagagatgcaggcgttgtaagacagggagctggtcggcaatactggcgcgactactggcgatatcattcatcccactccatgcggcgatcgtggcaatcgccagtagcggtacccaaatccatgcggcattcgccaggctcatcacgctaccgtcggcctgcggtacgccattgacgccgagaaaggcaaatacaggtacaaaaatgaccagcggtgcaaccagctgcattacacttacacctaagtttcctaatccgccattaatcccaagagcgctcccttgtttggcttttggaaagaagaaactgatattgcccatgctgctagcaaagtttgcacctgcaaaaccgcatagcaaagcgataacgataaatatcccaaaaggagtattcggattttgcacggcaattccgagccagacgcaaggaataatcaggattgcagtactaaaaaccgtccatcggcgtccaccgaatataggcaccataaaggagtagggaacacgcaataatgcgccagaaacggagggtaatgcggttaataaaaagagttgatcggtagtaaaattaaaaccgattttattgagattaacggtaactgcgctaaatagcatccagacacagaaggcaagaagtagacaactgacacttatccagagatttcttcgagcaatatgttttcctttattttcccagaaggccggattttctggtttccagtcgcgcaaaagataacgactatttttctcattttgcagtgccatattgttcctcacatgcacacattggtaatgaaaaaaagacaaaacacgaggtaaggcgcaatagccagttattagaattaaggatgaattgggtgaagtgctgattgaaagaatagataagaaagcgtaaccgcgggggcagaatggggattaagtagccagatatgtgttactaaatgtaactaacaagctaaccttcaaacggggttaatctttgaacgtatgtcatgtttcaacccttcagatcgtgaatctaaagggttacatattaactatattatcaacaagaccagacacttatagaattagtgatgatttattcattaaaaaggccaactactggaggaaaagcttctgtccagaaggtctatcggttcctctcttattgcctgattgtaataatcgttattacagtaagtattgtttatttcatctaaggtcatgtttttaacttttatattcatctggtttacaacttcctctgtcttgtaagtgtgtatattatatggggtatatgcttttttaataggatagtgaaacaattcgttatccacatctattccgtcagagtgaacttcaaatgcaccagggctaagaattgccaggccagtattaagcttaagtgctggggaaaacaaattaaataacatgagctgcatagtagggcaattgttcttcccagaaacatttaaaaaatttaagttttgctctgttttattatggggaataaagttccaatatcggatgtattattagtatcaatgtgggttattttattattgtccagtcttaaacttttgatagatggaagataagtcaggaaatcaagatttatatatttcaactggttgttagcagcgtttaatgtctgaacattgcagaagttgctatagaatattttaatttcagaaagcaaattgttgttaataagtaacgtattcaagttgggaaataagtcattgtgtaaacttgttagtttattatgggatagatccagcagtaagagttcatttttattacctgcaacaatatcagttaattgattatggctgagattcaggtattgcagccattcgcaagattctaattgcacaaactctagttgattatgtgccgcactaaaataagtaacactactaagcctatctatatcaatatttctgagagcattattattcatagatatatgtgtaatacttacatttctgccttgaggaaaatttatactctcaagagcattactattcagacttagctttacgagtctatcgtagttggttgcatcaaaatgtgtgaattggttattatcaagattgatagatgtgaagttttgcagccctggtggttgagtggttaaattaagtccacttaaatcaatggtcacttcattagtgtcatcaattatatttcttactgcagtccagtactgcatttgtgcaagtggatcattgttgatgccgttaactaatacatgccaaagatgtttactacttattagttgatcaatgtcattggttggcagtaaattgttattgcttaagtttaaatattccagttttgtagtgtttttggcgtttaaatgtgcaatatggttgtcgtttaaagtgattgttttcatcctgggatgattgtgtaatataaggtcagtgatcatattgtgatgggcacttaactcaatcagagattcttgccgcggctgccgttggcttcatcgttatagcctttaaaatcatattcccagtgaccaaaaccaatcatttgatcattgatttgcgtttctcctttaaagccgagacgggcataagttttatcaccatcgtcacgcttatcatcagtaaaataacgtagagcggtaaccttgccataaaggtcgagtttattaccatccttgttatagacttcggcagcgtgtgctacgttcgcagctaacaaaccagttacaaccaccgcaactatttttaatttcatttaacagaatccttttaattatcgttaaacgtattttctaaacgaattttaaacggcgtcatttataaatgacatactgtttttaaaatagaatggtgattaaaaacaatgagaaaaatagatgaaataatattatttatcgatatgtgatcgaagtcgaaatgagatataaggtgaattactggtatttgaaatttatttttttaatattgtcggaatttatctgattaactaccgggccgtagacccggcagttattttaaccacgacgtgtcgccagccagcagagcagggaaccgccgcagaccatcagcgcgccttgccagaagctgaagctcagcggggcgctgagcagcacggctgcaagcgcactggaaagtacaggcgtaaaatagctacctaccgccataatggtgacattgccatgcaatataccgacattccatgcagcataagcaaatcctaaggtaaatgccgcagagatgagtttaatcatgacgggcgtgctaaatatcatttctggttgtggcgtaagaaaatagtaaacccacagacttgctcccgttagcaggacaaaaacggtaattccattaaatccgcgtgcgtatttattcgttactgtgcaataggctgcccagataaacgcaccaatgaacgccaggaaataactcaatgggctggtggtgatattattgatgatttcatcataatgtaacccattgtcaccgcctaacacccaacagacgccgacgagggctaataataatccaggtacaatcaaccagttggttttctgaccattaaacagaatggcaaagagaattgtcaggctgggccacagatagttcaccatacccacttcaatcgcctgatgatgggtcgccgcataccctaaggaaagcgccagacagatttcatagctgacgaataacagactcccggcgagtaaatagcctttcgggatttgccgaatacgcggaaatccaaccgtgaagattaacagcagcccgcttaaactatagatagcagctgcgccgccgaccgggccgagcccctcactgacaccgcgaatcaatcctaccatcgtgctccacaggacgatcgctatcagccctatgagcgttgctttttgtcgtgtcatgctcgctgttttgtctctcttgccgttaaaaattaagctgaattttatagcatttttttaactggcctgtcaggcagtggtgcgtttttctaccgctattgaggtaggtcaatttgcgaaggcggattattttgtggcaaacagatgttctttttgatttcgcgcaaaaagattcagaattttactgttagtttcctcgcgcagtaatacccctgaaaaaagaggaaagcaatggacgtcagtcgcagacaattttttaaaatctgcgcgggcggtatggctggaacaacagtagcggcattgggctttgccccgaagcaagcactggctcaggcgcgaaactacaaattattacgcgctaaagagatccgtaacacctgcacatactgttccgtaggttgcgggctattgatgtatagcctgggtgatggcgcaaaaaacgccagagaagcgatttatcacattgaaggtgacccggatcatccggtaagccgtggtgcgctgtgcccgaaaggggccggtttgctggattacgtcaacagtgaaaaccgtctgcgctacccggaatatcgtgcgccaggttctgacaaatggcagcgcattagctgggaagaagcattctcccgtattgcgaagctgatgaaagctgaccgtgacgctaactttattgaaaagaacgagcagggcgtaacggtaaaccgttggctttctaccggtatgctgtgtgcctccggtgccagcaacgaaaccgggatgctgacccagaaatttgcccgctccctcgggatgctggcggtagacaaccaggcgcgcgtctgacacggaccaacggtagcaagtcttgctccaacatttggtcgcggtgcgatgaccaaccactgggtggatatcaaaaacgctaacgtcgtgatggtgatgggcggtaacgctgctgaagcgcatcccgtcggtttccgctgggcgatggaagcgaaaaacaacaacgacgcaaccttgatcgttgtcgatccccgttttacgcgtaccgcttctgtggcggatatttacgcgcctattcgttccggtacggacattacgttcctgtctggcgttttgcgctacctgatcgaaaacaacaaaatcaacgccgaatacgttaagcattacaccaacgccagcctgctggtgcgtgatgattttgctttcgaagacggtctgttcagcggctacgacgctgaaaaacgtcaatacgataaaagctcctggaactatcagctcgatgaaaacggctatgcgaaacgcgatgaaacactgactcatccgcgctgtgtgtggaacctgctgaaagagcacgtttcccgctacacgccggacgtcgttgaaaacatctgcggtacgccaaaagccgacttcctgaaagtgtgtgaagtgctggcctccaccagcgcaccggatcgcacaaccaccttcctgtacgcgctgggctggacgcagcacactgtgggtgcgcagaacatccgtactatggcgatgatccagttgctgctcggtaacatgggtatggccggtggcggcgtgaacgcattgcgtggtcactccaacattcagggcttgactgacttaggcctgctctctaccagcctgccaggttatctgacgctgccgagtgaaaaacaggttgatttgcagagctatctggaagcgaacacgccgaaagcgacgctggctgatcaggtgaactactggagcaactatccgaagttcttcgttagcctgatgaaatctttctatggcgatgccgcgcagaaagagaacaactggggctatgactggctgccgaagtgggaccagacctacgacgtcatcaagtatttcaacatgatggatgaaggcaaagtcaccggttatttctgccagggctttaacccggttgcgtccttcccggacaaaaacaaagtggtgagctgcctgagcaagctgaagtacatggtggttatcgatccgctggtgactgaaacctctaccttctggcagaaccacggtgagagcaacgatgtcgatccggcgtctattcagactgaagtattccgtctgcctagcacctgctttgctgaagaagatggttctatcgctaactccggtcgctggttgcagtggcactggaaaggtcaggacgcgccgggcgaagcgcgtaacgacggtgaaattctggcgggtatctaccatcatctgcgcgagctgtaccagtccgaaggtggtaaaggcgtagaaccgctgatgaagatgagctggaactacaagcagccgcacgaaccgcaatctgacgaagtggctaaagagaacaacggctacgcgctggaagatctctatgacgctaatggcgtgcttattgcgaagaaaggtcagttgctgagtagctttgcgcatctgcgtgatgacggtacaaccgcatcttcttgctggatctacaccggtagctggacagagcagggcaaccagatggctaaccgcgataactccgacccgtccggtctggggaatacgctgggatgggcctgggcgtggccgctcaaccgtcgcgtgctgtacaaccgtgctagcgcggatatcaacggtaaaccgtgggatccgaaacggatgctgatccagtggaacggcagcaagtggacgggtaacgatattcctgacttcggcaatgccgcaccgggtacgccaaccgggccgtttatcatgcagccggaagggatgggacgcctgtttgccatcaacaaaatggcggaaggtccgttcccggaacactacgagccgattgaaacgccgctgggcactaacccgctgcatccgaacgtggtgtctaacccggttgttcgtctgtatgaacaagacgcgctgcggatgggtaaaaaagagcagttcccgtatgtgggtacgacctatcgtctgaccgagcacttccacacctggaccaagcacgcattgctcaacgcaattgctcagccggaacagtttgtggaaatcagcgaaacgctggcggcggcgaaaggcattaataatggcgatcgtgtcactgtctccagcaagcgtggctttatccgcgcggtggctgtggtaacgcgtcgtctgaaaccgctgaatgtaaatggtcagcaggttgaaacggtgggtattccaatccactggggctttgagggtgtcgcgcgtaaaggttatatcgctaacactctgacgccgaatgtcggtgatgcaaacagccaaacgccggaatataaagcgttcttagtcaacatcgagaaggcgtaagggggcgaacagatggctatggaaacgcaggacattatcaaaaggtccgcaactaactccatcacgccgccttctcaggtgcgtgattacaaagcagaagtcgcaaaacttatcgacgtttccacctgtatcggctgtaaagcctgtcaggtggcgtgtagcgagtggaacgacatccgtgatgaagtggggcactgcgtcggggtttacgataaccccgccgatctgagcgccaagtcctggacggtgatgcgctttagcgaaaccgaacagaacggcaagctggagtggctgatccgtaaagacggctgtatgcactgtgaagatcccggctgcctgaaggcgtgcccgtctgctggtgcaatcattcagtacgctaacgggattgtcgatttccagagcgaaaactgcatcggctgtggttactgcattgccgggtgtccgtttaatattccgcgcctcaacaaagaggataaccgggtatataaatgcacgctctgcgtcgatcgcgtcagcgtcggccaggaaccggcttgtgtgaaaacctgtccgaccggggctatccacttcggcaccaagaaggagatgctggagctggcggaacagcgcgtggcgaaactgaaagcgcgtggttacgaacatgctggcgtctacaacccggaaggggtcggtggtacgcacgttatgtacgtgctgcatcacgccgatcagccggagctgtatcacggtctgccgaaagatccgaagatcgacaccagcgtaagcctgtggaaaggcgcgttgaaaccgctggcagcggctggctttattgccacttttgccgggttgattttccactacatcggtattggcccgaataaggaagtggacgatgacgaggaggatcatcatgagtaagagcaaaatgattgtgcgcaccaaatttattgatcgcgcctgtcactggaccgtggtgatttgcttcttcctggtggcgctgtccgggattagcttcttcttcccgacgctgcaatggctgacgcaaaccttcggtacgccgcagatgggacgcattttgcacccgttcttcggcattgcgattttcgtcgcactgatgtttatgtttgtgcgttttgtgcatcacaacatcccggataagaaagatattccgtggctgttgaacattgtcgaagtattgaaaggcaatgagcataaagtggcggatgtcggtaagtacaacgccgggcaaaagatgatgttctggagcatcatgagcatgattttcgtgctgctggtgaccggggtgattatctggcgtccgtactttgcgcagtacttcccgatgcaggttgttcgctacagcctgctgatccacgcggctgcgggtatcatcctgatccacgccatcctgatccatatgtatatggcattttgggtgaaaggaagcattaaagggatgatcgaagggaaggtaagtcgtcgctgggcgaagaaacaccatccgcgctggtatcgtgaaatcgagaaggcagaagcgaaaaaagagagtgaagaagggatataatctcttttgaactttaagctgaaaatggcgctgtaaaaggcgccattttcatattgtagacaacgtaggctttgttcatgccggatgcggcgtgaacgccttatccggcatgaaaacccttcaaatccaatagattgcagtgaacgtgtaggcctgataagcgtagcgcatcaggcaatgttgcgtttgtcatcagtttcaaatggcgctgtaaaaggcgtcattttcatattgtagacaacgtaggctttgttcatgccggatgcggcgtgaacgccttatccggcatgaaaacccttcaaatccaatagattgcagtgaacgtgtaggcctgataagcgtagcgcatcaggcaatgttgcgtttgtcatcagttctaaatggcgctttataaagtgccatttttttattgcgtaaccagacggcgtaatcggctcacatccactgttttttctgcctctgccagactccaggcgttttgcagattcagccacatttgcgggctactgccgatcaccacggaaagtttaatcgccatttctggcgtcaaagctgcttttcctgtcagcaatcggcttgccgtactgggagcaatttccattgctctggcaaactcgcgcaggctgacattaagttcgtccagactttcctgaataatgtcccccgggcggggatgattggccattttcattagtgtctttactctcagtagcgttccttcactgggaacactatcattattgttccttcctacgcaacaataatccatttagccatttcatgttggagagtgtgcgatgctgcgacccgaacatggcagtcgcagcaaaggcctcttagtgacggaaatcaatcaccatgcggccacggattttgccttcttccatctcagtaaagatggtgttgatgtccgctaacggacgcagggcgactttcggcaccactttaccttcggcggcaaactggaaggcttcagttaaatcctggcgcgtgccgaccaggctaccgaccacttcaataccatccagcacaagacgtgggatatccaggctcatagactccggcggtagaccgacagccacaacacgaccgcctgcacggacagcatcaactgcgctgttaaacgcagctttagctaccgctgttaccaccgcagcgtgagcgccaccagttttctcctgcacaattttggcggcgtcttcggtgtgactgttaatcgctaaatctgcgcccatttcggttgccagttttaactgctcatcattgacatcaatggcgatcactttggcgttaaagacattcttcgcgtattgcagggcgaggttacccagaccgccaagaccgtagatagcaatccactgccctggacgaattttactcagcttaacggctttgtaggtggtgactcccgcacaggtaatgctgctggccgccgcgctgtccagaccatctggcacttttaccgcgtaatcggcgaccacgatgcactcttccgccatcccgccatcaacgctgtatccggcatttttaacactacggcagagcgtttcgttaccactgttacagtattcgcaatgaccgcatccttcgtagaaccacgccacgctggcacgatcgcctggttttaaactggtgacacctggacccacttctgccaccacaccgatgccttcatggcccagaattacgccggttttgtcaccaaaatcgccattcttaacatgaagatcggtatgacatacaccacaacactccattttcagcagggcttcgccatgtttcagactgcgcagtgttttatacgtaacgtcaacatgatgatccttcgtaacaactgcagccttcatagttcctccttttcggatgatgttctgcatagcaggtgaggcaaatgagatttattcgccactacccagtatggatgagatctgaaaaagggagagggaaatagcccggtagccttcactaccgggcgcaggcttagatggaggtacggcggtagtcgcggtattcggcttgccagaaattatcgtcaatggcctgttgcagggcttcggcagaggttttcaccgccacgccttgctgctgcgccattttgccaaccgcaaacgcaattgcgcgggagactttctgaatatctttcagttccggcagtaccataccttcgccgttcagcaccaatggactatactgcgccagcgtttcacttgcgctcatcagcatctcatcggtgatacgactcgcgccggaagcaataacacccaggccgatgcccgggaaaataaaggcgttgttacactgggcgatagggtagattttatctttccataccactggattaaacgggctgcccgtggcgaccagcgcgttaccttcggtccaggcgataatgtcctgcggtgtggcttccacgcgactcgtcgggttagacagcggcatcacgatcggacgcggacagtgtttatgcatctcacggatgatctcttccgtaaacagcccggtctgtccactgacgccaatcagaatatctggttttacattgcgcaccacatccagcagactcagcacatcgctgtcggtatcccagtcactgaggttttcgcgcttctgcaccagtttggtctggaaaggcagcaggttcggcatcttgtcagtcagcaagccaaagcgatcgaccataaagactttctgccgcgccgcttcctcgcttaatccttcgcgctgggtctgggagatgatcatttcggcaatgccgcatcccgcactacctgcgccaaggaagacgatttttttctcgcttaactgaccacctgccgcgcggcttgctgcgatcagtgtgccgactgttaccgccgcagtgccctgaatgtcatcgttaaaagaacaaatttcattgcgatagcggttaagtaacggcatcgcatttttttgagcaaagtcttcaaactgcaacagcacgtctggccagcgttgtttcacagcctggataaattcatcaacgaattcatagtattcgtcgtcagtgatacgcggattacgccagcccatatacagcggatcgttaagcagctgttggttgttcgttccgacatccagcaccaccggaagggtatacgccgggctgatgccgccacaggcggtatagaggctcagtttaccgatcggaatgcccatcccgccgatgccctggtcaccaagccccagaatgcgttcaccgtcagtcaccacaatcactttaatattatggttcggcacgttttgcagaatatcgtccatattgtgccggttctggtaagagataaacacgccgcgactacggcggtagatctcagaaaaacgctcacaggctgcgccgacggttggggtataaataacaggcatcatctcatcaagatgattgtttaccagacggtagaagagggtttcgttagtgtcctggatgttacgcaggtagatgtgtttgtcgatttcggttttgaatccctgatactggatccatgctcgttccgcttgttcttcgatggtttcgaccacttccggcagtaaccccagcaggttgaagttacggcgttcttccatgctgaaggcactgcctttattcaacaacggaaattccagcagtacagggccagcgtaagggatataaaggctacgctgtttttttgtttttggttccatgtcactcactcttttttgaatatccatccctggggggcttttatcgtctttgctttaccgccagggcgtcggcctcaagtataaagcagataaaaacaaaaacaccattgcgcaggcaatggtgtttaatcgtcattgaggactgatggttatgaattacttttcagcggggcgttttctgccggttgggttatttactacgctggatttgtcaccttcggtaactattttgcgctggttagaaattttatggtccagtccaagaatatgacgtgcctgacggttgcttttcattttaactcctcaatcctgtagctagttttaaggacaacatcgccgtagcgaagaaacacgtgctaaacccctaaattaggttgccgatcaagcatagcaccttaaagcgtagggtgctggccactgaccacataattgatcgtttgctggtagatatcactgaggatgtcgttatcagaagcttcaacccatttggtcagctccatgagaatgtcatcttcagtgacaacaccatgctgtgcccgaaggccttgctcaatggcattaaccagagcgggttctgctgtactattttctgcctgataataagtaaacatagtgattctccgtgtctgtgtatttatggtgtctgctacggatcgcagatttataaagcacattcagcatggcaaatatttgccgcttcgttgttaagattagtcctggttgatgatttttatattttaacaccatgatattcatagggattgtgattggtatgatccgattaatattgatacaatatcttttgggttatatattcccggtaatctattgtgggaatttaatttaagtgcagaagtaatattttcgccggattttattcggaatatcctgcttatcctcgtgctgtttctcacgtagtctataatttcctttttaagcccacaggagagcaacaatgacaatccataagaaaggtcaggcacactgggaaggcgatatcaaacgcgggaagggaacagtatccaccgagagtggcgtgctgaaccaacagccgtatggatttaacacgcgttttgaaggcgaaaaaggaaccaaccctgaagaactgattggcgcagcgcatgccgcatgtttcagtatggcgcttagtttaatgctgggggaagcgggattcacgccaacaagcattgataccaccgccgatgtgagcctggataaagtggatgccggttttgcgattacgaaaatcgcactgaagagtgaagttgcggtgccgggtattgatgcctctacctttgacggcataatccagaaagcaaaagcaggatgcccggtctctcaggtactgaaagcggaaattacgctggattaccagttgaaaagctaaagcattgccggatgacgcgtcaggcgcgtgaatgcctgatgcgttgttagcatctttacagcgcccgccagcaccggagctcacgtccgtcctcccttattgctaaactttgccggacttcacatccgtgggttgccagcgggcaacgttcgtagaaaaaacagccttgcggcaacgtgcggtttcccggcagatccgttttacgtaatgcccattcttcctccagcggtttatcaatggcggggagggaatccagcaataatcgggtgtatggatgtgcaggtgccgtcagcacctgctgcgcgtcgcccagttctacaatctgcccgagatacatcaccgccacccgatcgctcatatgacgtatcacgctgacattgtgactaatcagcacataggtcagcccgtgattttcctgtagcgttaccagtaaattgaggatctgcgcctgaacggagatatccagcgcagaggttggctcatcaagcacaatcacgtcaggctggctagagagtgctctggcaatggcgatacgttgccgctgcccgccggagaacgcatgaggcaggcggtcgagatactccggacgaatacccacctgcacagccaactcctctgccaacgctcgccgctgttgttcactactacgcttagctatccagagcggttctgtgatgatgcgccacaccggtaagcgcggattaaggctagagagcgggtcctgaaacaccatctgcataatgcgttgactgccagaacggatgtactgcccgtggctcggttgcagcatacccattaaaagctgtgcgagggtgcttttgccgcagccactctcgccgacgatccctaaggtttcaccacggcggatctgtaaatcaataccattaatggcatgaacatgttccgtagttttaccaagccagtttttacgggccgggaaattgatatggacgtcgcgtaacgttaataacgtgtcagacacttataacctcctgctgcggataccaacaggcacagcgctggttgttgtcaccacacgctgtcagcgccgggacgttttcacactgtgcacctgccgcatagcaacgatcgcgaaaagcgcagccgtcaggcaaatgggtgaggtttggtaccgtccctggaatggcgggtaatagctggcgtggtactccatgttctggtgcgcattgcagcaaaccaatggtatacggatgccggggatgatggataacgtctgccgtcacgccgctttcaattacgcttccggcatacatcacgtaaacgctatcgcacagttggctcaccacggccatatcatggctgatgaacagaaccgcagttccactggcgcgggctttatgtttaagcaaacgcagtacctgcaactgcaccgtgacgtccagcgccgtagtcggttcgtcggcaataatcaattgcggctcgcaggagaatgccagcgcaatcattacccgctggcgcataccaccactaagctcaaacggatagcggctcataacttccacggcatccgggatttgcatctcttccagcaggtcaatcgctttagctctggcttcccgacgacttattggttgatgatggcggatcacgtccatcatctgaagacctattcgacgtgtcggattgaggtcggtcatcggttcctgaaagatcatcgccactcgtgcgccgcgccactgacgaagctgtttttcccgcgcgttaagaacatcttctcccagcagggaaatctgcccccgatgtacgcaataactgcccgtcggtagcagacgcataatcagcattgcggtgacacttttaccactgccggattctcccaccagaccgacaatttcaccgcggttaatctgcaaggacacattgttgagcgcgtgaacatcaccgttaaaaccggggaaactcaaatgcagttgttgaatgtccagaacgggttgggtcatgactgctttcctcctgctttttagttcaactctgctttcctcctgctttcgggtcaagcagatcgcgaataccatcaccaaagagattaaacccgacggcggtaagcaaaatcgctgcccccggaaatgcgcaataccaccactgatcgagtacatagttgcgaccatttgctaccatcgcgccccattcagcactcggttgttgagcacccaggccaataaatcccaacgtggcggccattaaaatcgcgctaccgatatccaggcttgcctgcacgatcagcggcggtagggagttacgtaaaatatgccagttgatcagatgccaacgagacgcgccaaaggttttcgccgcctgaacataggtatactggcgtacaactaatgcttgcccccgcgccaggcgcacataaaagggaattcgcacaatagcaatagccagcatggcgttaaacaaactcggcccgagagcggcagccagtgccattgtcagtaccaagctaggaatgctcagcataatgtccatgatgcgcatgatgatggcgtctgcgcgtccaccaagcacaccggatagacatccgagtaggctaccaatcatacccgcaatggcaaccacgactaatccggcgagaatactttgctgactgccgaccagtacgcggctaaacagatcgcgtcccacttcatcggtgccaaaccagtgcgccgcagaaggcggcaaaaggcgggcggttaaatcaatggcgttgggatcatgcgtcgccagccacggactaaaaatcatcatcaatagcattaatacaatgatgactgcgctggtcacggtgagcggactgcctttcagcatccataccagttttgcaccgttaaatcgcgtttgtttttgtgggcgtacggcggacgtttcctcgcttagcatcattcaccacctccacgtccgatacgcggatcaatccacaaatagagcaaatccaccaccaggttgaccagcacataagcaaaactaaccacgacggcaaagcccatcactgccgggaagtcgagcgcctgtatacttgttactacccatgcacccattccgggccaggcaaaaacggtttcggtgagcactgcgccatacaacaaatcgcccagcgccaaacccaatacggtaatgcttgggatcaacgcattgggtagcgcataacataaaacgatataccagccgggcaagccgctggcccgggcggtacgaatgtagtcttcactcaattgttccagcatcgcactgcggatctggcgagcgacaattcccaggtgaacgaacgccagcgttaatgccggtaagatgagatgttgcaacgcattgaagaagacttcaccgttgccttcaagcagcgcatcgagcagataaaagccggtaacgtgcgttggtggatccagccagtcatcaagccttccgccgccgggaagaatttgcagatgaccataaaacagcacaatgacgcccagcccaagccagaacgcaggtgtggagattccggtaatggccattattcgcaccagatgatccagccagcgatttcgccagactgcagagagtatgcccagcgggatgccaatcaggagtgccagcagcagggcaccaaaagccagctccagcgtcgccgggaaaaatatacgcaactcttccagcaccggacgcccggtacgaatggatgttcccaggtcaccatgaaacaggtcgctgacgtagcggtaaaactgtacatacagtggctggtccagtcccagttgctggcgaatattttccacgatagcatcgctggcgcggtcacccgccagtaaccgcgccggatcaccagggatcagatggctgataataaacgtaatcacgcagacgcccgccaccacgagcaccagcccccagcagcgttggcgtaaaatactccagaaggtcacgttatttactcatggtattgatattgaagacctgttccagcatgggattgaacacaaagcctttcacctctttgttcatcgccagttggtagtttttctggaacaggtacacataagcagcgtcatcaatgacgattttctgtgcctgctggtagtcccgggtacgctgcgtctggtcggtggtcgcaagcgcattgcgcagtaacttatcgacctcactgttttcatagaagctgcggttacccggcagaccttttttgtcactctcaaaccagtaattcataaacatatacgggtcggcaaaatccggactccagttgccaatcgcaatgtcgtaatcacctttacccactctgtcgcgcatggtggcgttcgccagcttttccagcttcacaatgatgcccagcttgttgagactggattgtgtcgccagagcaataggctcccagttcggatcgttatcggagtagagaaacgtcaggctggtgggtttgctcgtcactttatcccattcggctttggctttcgtttcgtcatggttgtattgcattgccgtcgcatcgtagccccacatgccttccggaatcgggccgcgcatctgttttccgttaccactcagaatgccgttaaccatgccctgataatcggtagaccaggaaatggcccgacgcagatccgcctgattaagaggcgctttgctgttattcagatacagataggtaacgcgcagactcggatactctgccacattgactttattttcctgcttcagggcgttgagttgatccaccggcagcgcatcggcaatgtcaatgtcgccacgggagagctgcaggcgacgggaggcactttcaccaataatttttacgcttacccgtttgaagttcggtttattgcctgggtaatgcggatttggcaccagaactaattgctgacctttttgccagcttttcagcataaatggtccggaaccggcggtattttgcgcgaggaagccgcgagcatcatccgctgcatgttcctttaagaccgccggattgataatggatgcaccgtcattcgccagcgtgtagaggaacggtgcgaatggttggctaagggtaaacttcaccgtatgttcgtcgggagcatcaatctttaaatctttgggaaatgcttctgctggcccctggccgatttttagtagccgctcaaaagaaagttttactgcttcggcagtgacaggtgtgccatcggcaaatttagcattatctttcagggtgaacgtccactctttttgatcgtcagacgctttccagctacttgccagatcgccttcaacgtcggtactgcctttatcaccgtccgttttgtactgaaccagccgctgataagacgggtaggtcactgtccagtcgttattatctattgttaccgccgggtcgagggtttgtggatcggcggccttaccaatcaccagcatatcttttggtacggcggcgtgcgcaaccgggaaatttgtggcaaggacgagcgcgagcaatgtgggacgaaagcttatgcttctcttcatgacagtttcctgattaactgacgtgctgtgtgccaggggatataaaacaagagaattgatcagcgagcagagggtaactcgctgcctggggtaattcgaagtgccaccattcgctggagataccgacaaaaccgccaccagtcattatcgcattcagcaacagccgattgcgctgagcggcgggcgggacggaagggtgataggcatgggagcgctcgtgcatttcatcgaaccctgcgcccatatcgaggatgttcccgtgctcatcacgaagcgtcaggtcgatcgccgtgccacggctgtgattagaaccgaccgtcacatcaacaacatattgcgggtctgggcaggcttgccacaacatcgcctgtgcttgttgtgggcgatacgcatcgtaaatcaccagttgtaacccactcagctgggcgatgctgatacttttcgccagcgcggtaatcgcatccttgtgtaacagacaacgcgcttgctgataaatagctttacctgtgatgttatcagcgcaggcgtatttcaattcgatctccagatcagggaagattacggctaaatcaaccagttcggtggtatcgctcataaacggttcctgtataagacaaaaattgctgcgctttccgcttatgcagatctcatgccatgccgggataagcgccagaatgctggcttaaagttatattttttaacttttgatcaacatttgtgcagcgtagtgcagttttggtgcaagaggggaagttaaggaaggaatctcccggaatcgtagctgaaatcacagtatttaagtgacagtgtcacgttaaatgaaaacccgcgagtgcgggcgagaggaatttgtcagattttcagcggtaacacgctgctcatccagcctggaatttcttcggcgggtagggggcgggaaaagaaatatccctgaataacgcgacagtggatcttgcgtagcatctcaaattgctctttggtttcgacgccttccgccacgacggttaaattgaggctttgcccaatgctggtaatggcttcaagtaaggcaaggatgcgtttttcggtcagacaacgatcgacaaaacttttgtcaattttgatttccgttaccggaagactgactaagcgggataatccggaaaagcccgtaccaaaatcatctacgcttaagcccacgcccatatcacgcaggatctgaatgcgcttaaagatttcggtatcgtgttccatcatcatgctttccgtgatttctaccgtcagctggtggccgtcaataccccaggcgtgcattgcatcagacacctgattaggcagttgattactgcgaaagtgcagcgcgctcaagttcacggataacgccgggatatgaatattctggctacgccattctgctaactgacggcaagcttccgcgatgacccagcgcccaatattttcgatttcaccaatctcttctgcgagaggaataaaccgactagggggcacatgaccatgcaggggatcgtgccagcgagcaagggcttcgatgccgtacagttcacccgtttctgcgaagatttgcggctggtaaaccagtttcagttggttattgctaatcgcttctttcagcgctgcgcctaaaaccaaacgctcttttaccatttcgttcatcgccgggctgaagaactgccagccgttaccgccattcttgcgaatataatccattgcattgtgagcagtggagagcaagtaatcgcggtttttacccaggtcgtagctgatgccaatactcaaggtaagcgggaagggtttatcgtcaatcattatcggcttgctgaccacattccgtagctcatcggcgatttgggtaatgttactgacgtcgttttcgaggctcacgaggacaaactgcgtaccttcgatacgacagagatactgatccggtttgagtttttcacgaaagcgattgaccacttccagcaatgcctgatcggcccacgcatagccaaggctatcaatcacatcctgaatatggtcaacaccgatgagatacaccacgggagagacggctttgtcgaccaggtcatcgaggtaattgtgcaggttattgcgatttggcagaccggtcatcggatcaaattggatgagttgttcaatatgctgacggcttttttcctgttccagcgccagcgcggccatatgctggctgatatctgccacgcgttcgataaaggcgctggtttctgctccactgctggttttaatttgcaggatccccgcaggcgcgccatcacgctgacgaatggtcgcactccagctttgcgcattttgaatttctgcaccgtgggaagaactcgcccagtgtatcggcatcccgttgcgcagtgcgaacaggctaacatggctttcgttgagtacagattcgatgttacgacaaatgatttcccccatttcatgaaatggcgggctgctgcacatggcggcgagaatattgccttcaagctggcgaatctgccgttcttcggtgatatcgctgaaagtcattaccaggttctgcagatgcgcgagcacgtcataaaccgggctgatagaggctttaatccagattttttcaccggtgcgcgtcaacagcagaaattcgtcctgatcgcgggcggttttccatagcaactgttgtaaacgaatgcggttatcggcagggaattcaggaatgttcaggagtgtatcgggctgcataccgctggcttcgctaatgcagtaaccaaacatttcggtaaatgcgcgattgcactgcacaatatggcgttccggatcgaggacaatcaccggtcggtcgagatggtcaacggcaataatcaattgtcgggtctgttctttttgcgccatttctacgctggcatcccgtaccagcgccaggtaataaactttcccctcggcgctcactttgcttagcgcaaaacgggtccagattttactgccgtcttttttctccagctgcagctcccgactcatcccctcaacacgcgctttaccgccttcacggttgtgacgaatgtattcaggatgcgcaggacgcaaatcccgcggaatcagcatatcaatgttattgccaatgacttcttcacgtttgtatccccagagcttctctgcggcggggttgaaaaacatcacttcatcattttcgttaattaacaccgcacccatcatattttgctcaagggcggggaaaaaaatgccatcggcggcattatccgcatcggttagcttcatgattacctctgcatcctggcgcatttaaagactggctttccagagttcaacacggtttctacctcgtcttttggcgatatacagagcttcatcggctatttgaatgaggcgctcatagtcaggatgaccattaaacatggcggcaccgatggaaagactgagggcaatatcttcgccgtttgcggctttcagtttggttttctccacccgactgcgaatacgttctgcggtacgtaacgtttcgttttcagaagcttcagtcaaaacaatgataaattcatcgcccccgtagcggaaaacataatcactactgcggacgttgtcataaaaggcctgagagactttacgcagaatttcatcaccagtgttatggccccacgtatcgttgatctctttgaatttatcaacgtcaataatcagcacactcagcggtgtaccggtccggttggcatgggcaatttcgcgtttgaagatagtcggtaggaaacggcggttaagtaatttcgtcagtacatccataccgacttcgtggcggcttacttcttcaaacaattcacgcagcaaggtaataatttggcttacggtatttcttatctgtaataaaaatttcacccgcagacttctgttattcaaatttctggtgttacgcatggtttgattgaaaataccgtcgaaatcctgaatcagacgggagatatggcctacttcggcaataccactaaaataatgtcgacctttatggttaaaccacaggccaaaatcagcctggcttaaaggcaaactactgcctaaatcagaatccagcaggattttatagataatatctatttcccaactaagtatactggctatttgccgttctttttcttcttcggcgttttccagtaagctgaagatacgatagttttcatcttccttactggcactactgtcactaaaggtaaacgcgcgagtcatcacttccatcgcgatatcaatactgttaatgctgaaatggtagacctgaagtttttctgcggcggaataatcgctagagaagatcaccggatagaggatttttttcagcacccgaaaccccatctcgacaatttctaccggaattcctatgcgggcatgcacttccgcgacggtatgctggatttgtattagcctttcgacatcgtcaacctgggcagaaagcacgttaataatccagcgttccatcgcactcttcaactgccgctcaacttgttcattactcaagaattcttcggcatgcgggtcgatgcggacaattcgataaaactcgatactcagataatgagcatgcgcaacggcaatttccgcggctttagcacgaatgggcggatctgcctgttcgacaagtccggtccactcatctttcattcttttaaaatacatctccataattcacacccttataaggctgggaaatcagacggaatcaaaatgaaacgcaacgtgcgagatcgactaactgcaccatattctcctgaaatatgaagatatactgaaaagaaataagcgatttaggacagtttcaatctacgctactgttcttcagaagagtatagcccatcgtaattatttttcggtgacagcgaatatcgtatggtttttcatattcatacatttttattagggatttatggctgtttaactaagtgtggttaatttgacttaagtaagcatgattattagtgggatagtttaagagggtaacaagccggtgggtaaagcaccggcttgttacaaagtaagaatgggagtttaactgccccagcgactttgcagatagctgaccgcttgttgagtctgcggtttattcagatagtcctcacggaacaagatggtgccgctaatttcgggcacagcatcgttaagatcgagctgctttttcagttccggtacgccgccgttaatcatccagtctggctctatcttactaggttcacccactttatagaaggcgataccgatatacaggcgggtcctggtcggtttaacgacatccgcccaccattttgccaacacgtcataacgcgcggcactccgactgaacggccagtaaatttggggagcaatgtaatccagcaatccttgttccacccatcgacgggtgtcagcgtaggattcgtcataggctgccgcgcctcgggtatcggaaccgagcggatcgtgacttcggttacgccacacgcctgccgggctaacaccaaattcgactcccggcttaatgcttttaatggtgtggcttacctttgcaattaactgctgagtattgttgcgccgccagtctgctttactcgcaaatgcgcctccgtatttacggtacgtttcgttatcatttagccgactacccggactctccgtatagaaatagtcgtcaaactgcacgccatctacgggatagcgggaaaccacttctgcgactatacttgtgatccagtcctgaacctcagggatgcccgggtcgaggacaaagcgatcgccagacgttctgatccagtcgcggtgttgcacatagacgctcgccggttgttgagacagagtgctattcagttccctgatagtaccgggcttcgtattaacgcttacgcgataggggttaaaccaggcgtgtactttcatcccacgcttgtgggcttcgtcgagcataaattgcagcggatcgtaacccggattttcaccaatcttaccggtcataagatcggaccacggcaaaattttgcttggccacagggcggtaccgtccggcttgacctggaaaaagaccgtgtttatgccgagacgttgcagatgatccagtttgtcgatcatcgcctgttgttgtacacgggcccggctggtggggttactaatgttaacgctggaaaccggtggccagtcgagccgagaaaccgtggccagccagatgccacgcatcggttgactgctttgttgcgtcgtggctggtggcttactacctgctggtggtgtcaccatggactctggaggcgtgcttttacaactacacagtaaaagtgccagtgcaactagtatcgctggtcttctaatcgttaatttcttgtttcgggagcagatatccatatgtgctggtttccggtaaacagatgtgcgctcattctcgtacttatccccgttaagtcaatacgacagcaagcacgaaaaagggagcgatgaattatcgctcccttgtcttataaccattcagacatggttagtgtttcttgtcattcatcacaatatagtgtggactacgtgcacgcgggtgcaggaagaagtgaccttttggtgcgttctgactgttgattggctccagagtgacgccggtatttgctttgcctttacgatcatgaacagcatagagaataaagggcagggcaagtaccaccaggaaactaacaaccagtaattcaacatacatatcggtagaatcaccctggatgttatccggcggcaggaaggaaacaataaacgccataatactagtcagcagaccgacaattgccacgaccagtttcacccctttaccaccagggatattaaatgtgcgttttaagtcaggatgtttaagaaccaacacaatgtagccaataaacagcatgaaataagcacacagataaatcaccaccgtcagcgccagtgcgatcaggaaggacatgttgttaccgccaccggtattggtgaggatgatcaacgcgatagacgtaatcaccagctggctaatgaccagcgttaccggtacgccatttttgttcattttagcgaatgccgctggcagcaggtttttctgcgctgttacatacatcccgcgagaaggaccaacaatccaggaggcgatttccgccagaacacccagcaacagcagtgcggagatcacgcgaaccgtccactcaatttctggtgccacatgggacatcagaacggtaaaggtttgcattacccctgcggagaggttgatttcattacccggaatgaccatcgcaatagacaaaccaccaacagagcttaagcagattgccgccaccatcagcagtaacatagccaacggatagtcgcgccctgggttgctcatttcattgacgtgggttgcggatgcttctacgcccatataactcaaaatgaaggcaacaaatactaccagggtgcccactttagagaagtcagggaagaaggtcttgctatccatttcgatagcaacgggggcaccggagtgcagataaatagccgctaatgcgatcaaaataaatgcaggtaacaggataccggcgaagaagccaactttagcaattcgcgccgtgtatttcgtgccaccaaactgcgttaatgccagcgcccaaagaatgatgagtgctgcaatagttttggtaatggggtcttcattcagcgctggccatttcaggatgtaggagagtgcccctaacacgaaatagagcatcggaataaaaccaatggcgatttgcagatagccaaaactgatcgctgcaaatccccatctcggccccagagtattacttacccaggcgaagacaccaccttcttcccagccgtcgacggtggccatttccgcagcacaaagtcccacgggaataaaccataaaatcccgcctaatagcaggaagaagactaaactaaagccgcttgttgcgaaggtagggtattcataaacagccattaccatgcttgccgttatggcaaagaatccaagtaatgtgagctgcttagctttacctgtctgtacacttgtagccatattatccccctaaaacggtattcctgtcggaaccgcacctgttttgttctgaagcgtattcagaacaatattttccgttgctaatgccagtgaacagactttggaaattgtcccgaaacgggttcgtttcgggacaccgttaccgttaaacgttatcaggtatgtttaaagctgttctgttgggcaataccctgcagtttcgggtgatcgctgagatatttcagggaggctttgtagtcttccagcaacagttcagcaaagtccatttcgaagccgcgacgacacataatgcgcatcaccacgatgtcggtggcttcaccgccgagagtgaaggccggaacctgccagccgcgcagacgcagacgttcagagaggtcatacagggtgtatcccggatcttcaccatctttcagtttgaagcaaaccgccgggatgccttcgtccgggcgacccgtacagatgaactcatacggccccagtttggcgatttcatccgccagataagcggcaacctggtaagaggcgttctgtactttggtatagccttcacgaccgaggcgcaggaattcatagtactgtgcaattacctgacccgccgggcgggagaagttgatggcaaaagtaccaatttgaccacccaggtagtcaacgttgaacaccagttcctgcggcagcgcttcttcgtcacgccagataacccagccgcagcccagcggagccagaccgaatttatggccactagcactgatgcttttcacacgcggcaggcggaagtcccagacgatatccggggcgacgaacggtgccaggaagccaccgctggcagcgtcgatgtgcatgtcgatgtcgataccggtatcggcctggaatttatccagcgcatcgtgcagcggttgtgggaactcatagttaccagtgtaggtcacgccgaaagtcggcaccacgccgatggtgttttcgtcacaggcttcaatcatgcgtttcgggtccataaacaactgaccggggcgcatagggatctcacgcagctccacatcccagtagcgggcgaatttatgccagcagatttgtaccggaccgcacaccaggtttggtttatccgttggtttgcctgcagcttccatacgcttgcgccaacgccatttcatcgccatcccgccgagcatacaggcctcggaagaaccaatggtgttggtgccaacggcctgaccatttttcggcgcaggcgcatgccacagatcggcaaccatatttacgcaacgcaggtcgatggctgcggattgcggatattcttctttgtcgatccagtttttgttaatggataaatccatcaatttgtggacattttcgtcgtcccaggtctggcagaaagtggccaggttctgacgagcgttgccatcaagatataattcgtcattgataatctggaatgcgacatcgtcgcgcatttcgtgcagcggaaaacgtttactttctgcgatagtggaaatagacttcgcaccaaaacgactatcgagtagttcgctccttaaatccgttacttgcttcttatccattttaaactccttaaaatgattggatcgcattaaaaaagtaggatttatcgataaagtaagcaagtgcaaaggactcgtgtttaaataacaaaatcctaatgttatttatcgtgagatattacgcgaataatattttttcattgaaaaacaatacaatatgaaattcttgggtggtggtaaggtgttttatgctgttatttttatgcgcattctgtgtctcctgaattatcacgtaaaaatcagaccttaaaatatcactattagtacttgattattattttgaacgcatttataaaattattacataaaaatagcgaatattgctaaaatccccgccaacgatgtgttgacggggctgttattattttggcaataatactccggtataagtatttaccggatgagaaagatattgtttaacggcagtgttaacattctctaccgtcatttgtttcaacaattgctcctgctcagtccatgctgcaggatcgtcatattgaataagactatttacaatagtgttcgctaattgttgaacgctacgctgttggatatcgaggctgcgctgaacgttttgctggtattcattcagttcttgctcactgatccctttagccagacgcttaaccatcacttcattcgctaacgttaacagttcatcatgtcgttctggttgacaagtaaaagccagcaaatgactgatatctttggcctgaggatcaacgctgaggcgagaagaaacgctgtatgctccagatgcctgttcacgaatattaacacgtagatcttttgccagtgcgacgttaaaagcatcgagcgccatacgcgtcggcagattaacaggtgtccgggaatcataacgcttccactgactaacctgtgccacaggttcattttgttcttttacagtaacgcttgcgttgtccgtcgcgcgagttaatggtttacctgcggctaatgggctatcagagtgtttgatacttcctaagtaacgcgtaattaacgccacgagtttgtcttctgcgacattaccgacaatgacaaacgtgatatccgctggagaactaaacaattggcgatcggcagccagcgcatctgcggcagtaaactgtgcaatctgattttcttgcagtaatttcgtgcggtcatcagcatagcgcgtctcatacatctgctgggcgaatttctccgctggacgctggtcgagcgttttcaacgcctgaatttgagcattttgtaggcttgcccaaatattatcgttaatcgtgctgtgggtgattcgctggttaatcaactgaaaaccaggttcagggttattagtccgcgcgctaacggagagcaacgtattcatgccactgactttactgctcatggttacgctattttccgcactccagcgtttcaggctggaagaggagagttcgccaacgccgcttccgctaactgctttatttgccagcgcgataagacttttttgctgcgcagggaaacttaaatcgcctttattgcttacggcaataatttgtagcttttgctcttcacccgcggattttgccagaataaccctggcaccattggaaagtgttaaacttgtcagattctccgccagcgtttctttgctgctaatttccgcctgtgggtctgcgtctactgttaagcttaaatttctgcctgggaagacgtaagccgccagctttttgttggcgtactccttttccagcgccaggatagccgcaggagacaatgcttttttggcggcaacctcattgtttaccatttgctcccaaaatgcgtcctggttctttcttaactgctgccatttttccgccagactttgcacggtaatttgctgccacagacgtttgctaagttgatatgtctcttccgggctcaagaacggcgtattatttaaactgctggatgccaggcgactggtcagcatacgtaaatcacgttcagcttgctgatcaaccgcatttttcagccaggtgaggcgggtagatttgacatcatcgagttcttcagcagaaaaaccatgctgatcaatggttgccaactctgccattaatgcattcgcagcatcctgcatattatcgtctcgtgcatttacacggaaaaacaggctctgataatcgggtgcaattttaacgctgcgcgcagtgccgccagaaatagtcttcaactcgccgctctgtatgcgttcctgcagacgttgattgaacagctgaactaacatgctccattcagcttgttcgataaagctttgctcatcgttcacttgtaccattggcaggcgataatagagtgcgatgccgttcacccggttttctttatcattaatgatattaaagcgcaggtggttttcggcttttgtcggccagacgcgattttcagctgctttgttagccggaagcttacttaaattatcctttatcagcgccagcgcttctttactgtcgatatcgccgaccacgataaaggtcatattatttggttgataccagcgttgataaaattggcgcaattgtgccggtgtgaccgtggcgacagtatccatcaggccgataggttcacggtctaaattacgggtatttgccagcaggaaagggcggcgcgcctgagaggtgcgccatttcgcatcctgatgggcacgccattcctcagtaattacgccacgttcagcgtctacttcgagtttttcaaaggttgcggcattactccattcactgaagattgccatcacttgttgcagattttgtttctgcgtagtcggcaaactcacctgatacaccgtttcgtcatagctggtataggcattaacatcgcgaccaaaacgcaggcccatactctcaaatgtttcgatgactttattacccggccatgtttttgtgccgttaaacatcatatgttctacaaaatgagccacgccgagctcattgtcttcttcctgcaaactaccggtatgaatttgcagccataaatttacctgatcctttggatgagcatgcggataaatcatatatcgcaagccattgtccagttgcccggtaattaacttttcatcctgcggtaaggcggcggcaatcagccgcccggggagcaacagagttgccactaacgtcagtaagaaacagaggtttctcataattatctccatgcgaaaaccgggcgaatttacccggttaagtaaaatccgaactattaaaatttcatgctgacatcaagccagaaagtacggccactggcgtaggtcgccacaccggtgttcgttgtatcaacagcggttttgctatccagtacattgagaatatcggcactgatcgtcaggttttgttgttgcagaaattgtggcgtccaggacaagcgggtgtcccaggtcaggctgctatccagtttttcgtcaacatactgcttgtaatcactatattcgctgatgtattgcgcatttgtcttaccaaggataatgcgagctttacgcgcttcttgccaggccagcgtattcgcccacactaacccgctcggttgatgcgtgaaatccatgtttaaggagatctttaatgggttattaaaatctgccactggaacgctatcgtaagagaccagattaccgttataaaccacctggttatcaccggtattgctctcctcataaccattgtttaagctcaagttgcccttgctcttgatatagctaaagacaatttgtgggttaatatctacctggcggatatgcaggggttcggccagttcaaaactgaggctgaagctatgcgttttggttttgccatcgttgttatattcagtaatggtggttttagtcgcgctgtcggtacgactgcttttgctgatttgatcatgcgcttcacggtaaacatagtttgcacgcgcaataacgttcttaccgattttctgctgcaatcccattgccagttcatcgttataaggcgttttcaaatcctgataacgcgtcagagttttattaccacttacgctttccgtccagctattgcggatatcacgtaatcccatatcaagaatattcccgccatagtaacggttataacctgctgtaatcatactggtttgattagcaaaaatatcccattccgtcataaagcgcggggagatattgtggttactcagatagttgtcatagtcataccgcacgccgggcattaaactcacattacgccagctaatgcgatccgccatatacagcgtgtagttgtcaattcccaggcggcctttacctttatggtaaatggtatggttagttttctttccggcagcattaatcacataggattcagactggttatggcgttcagtccacgcatcggaatagatgtattccgcgccgaagtagggttgatggctaacattacccacggcgaatttttgccagtccaggcgtgttttgaaggtgtaattatctacagcctgggaaatgtgtcctaatccgccacgggtgcaacgccctgtaatatcaccatatgtacaactaagttcggtgtaccagatgtcatgatcgtgacgggtataatcactaatatgatcccaaccaacggtggtacgcagtttggcccatgcgagctgcgtatccatatcccatgccagaccataggatttattacccatttcgcgatcagactgcgggaaggtgctggtattataatcacggctggagccggtatattttaaggttaaatcgtgggtaaagcggtcgctggcaaaccaggtaaatttgcttaatgcagtatcgataacgtttttatactgtgcccgaccggcgacaatgccgtcattgctaacataatccgcgcgggtgatatcagactggcggcggcttaaaccggcggtaacgccgaagttatcagcgagttcctgattaaagctcaaggtataaaagttctttttaaaatctggggagtaataagtacttccactagagccttgattaaatgcgctcttgttattctcatcgatatggcttgttaaccagtcgctacgcgtagtgcgataacccaatttcaccttgctatcatcagcgttgaagcgtttgatctttgcatcaattaccccgccattgaagcgaccaaattcaaccggcacaaaactgtcataaagcgtcacattgtccagtaagctgacatcaagataatacccctgactcatcccgctaatattggttgcactactggcatcggactcattcgctgggttcaggttattagttgcactaataccgtcaatcaaataggcattctggtaggggctcgcaccgtgaatagagattttctcagggcgaatatctccctggttcaagctggtactttgcgtactatccatgcgtaccgcagggttggttctcagcagatcgctgatattgccattcccggtcggtaaacgctcgatgctttcactggtgtaatgcgtgttgccgtttacgggtacagggacaggagcatagaccgtcatctcttcaaaaaaatgcatgtacatgtttttgtcatcgacggcctgcgccacatcagcgccacataaaatgacgccaggaataagaactcgcttcatttatttatatctccgtacagcagggcttttattgtttttataaaaccgcgctaatgtcacaaatatcatcggccaggttccagacaccgggttgatgtgtaaccataatgacgccgcttgtgggtagtttttcacgcactaaacgcagtaagcggatagcctcttgttcctcaagatgagaggtagtttcgtcaagaaatatccatttcggacgtcgtaaaattaatcgtgccagggcgatacgttgtttttcgccgctggaaagaatatctccccagcgatcgtggtcatgaatacgcgcagccaatttcccaagaccaacctgatgcagtacttcgctcaagcttttatcgtctacgggcaggggaagtgctttacaaataatctctttcagtaagccggttttgattaacggtgtttgactcacataccaactgtcagcaggagaagaaatatcacctttaaaccacggccagcagtgggataatgttttaagcagtgtggtttttcccgcgccagagtagcctttcagtaatagccatttgcctgggctaacatgaaagttcaggttctctaatatgatcttattatcaggcgtacgaatactcgcatcagccacttgtaccgcatgttggcaatttttaggcttattcgtagggcgctgttcagtgagttgatggaactcatacaagcgatcgataaccgcagccagttcagcaagttcgtcatatttataaataaaccagcttaaattgttgcttaccagcataaatgcctggcggcttttcatcagtccgcccagattgatctgcccgctaataaactgcggcaataacagaaagtagggaagaacgctaaggctgcggctataaatattctgccagtaatcaagccaccgctgacgattcattaaacgatgccagttctctttaatggtatgaaaattgtcgctcaactcctggcgttgtagagactcagcattgcttagcgcaatcagttctgcctgcttattatgctgcacaagatttgttcgaaatgtcgcttcgctacgttgtttttccacattaagcggacgaatacgtttacccaccttatgggtaaataaagttccaccgatcacaatgagcacgacggtatagaccatatacccctggatattccattctgttccaccaacagtgaaactgagcgtacccgcgctttcccaaagaataacggtaaaggtgatcagcatgctaagactctggatgaagccaaaactaagactgagcgttttgctgatcagtaagagaatgtcttcagcgatacgttggtcagggttatctgtatttttatgctcgccgtagatctgcgtgaagtagtagtttttatctgcaaaccaccgattaaggtagtaatctgttaaccattcgcgccagcgaatagtcagtagtttaattaaccatgttttgtttacggatattaatacaaagatccccagcagggcagggaaccaaaggacaagctgccaaagcttatcggtttctttctggcttagcgcattgaaaaaatcattattccagtcgtttaaccagacctgaattttaaccacgccaaggatcatggcgaggataataatgattaacaacacactagttttattattcttacgcagccaaaagggcttcaacagacagagatactttgctatcaacatacgaagcgtaatgggaatggttatcattagcgaaaattgattgtgccatccaatgattatctatggcaatgatttactgatgaaatttatttaagtatcatttaacaatatgaaatataaaggaatatttcattttcagtggttatggttatgctattgataatcaaggatattgctaatgccctgatgcataccacgtaagccaggattttcgcaagggaagatgatgatgacgaaacacccgacaggaatttatgtcgggtgccttgttaaggtcataagaaggaggctaagaatggagttaaaagagagcgttattaattattctccatttgttttgcaacatccataatgtggtaaagcggtactctgttcttagctaactctaccatggcgttcatataaggtaccatggtactaaaaaggattttataaccttcgcaaaaataagaaacagtctcattgtttactttagtaatacgatgcttaggacaaccgccattgcagataggtttatatgcacattgctgacatttcgctggaatccgttttttttgcgctgtcagttgtacactgttcatcgttttgagttcagatttattaatgtttccaattttgtactgtggatagacaaaatggtcgcattcgtaaatgtctccattactttcaacaaccagattatccttgcaggactcctggaaaatacaactggtatgcccattccccaaaaaacggctgacaaagctttcaaactgacggatgaaaatttcacccacatcgtttttaacccattgcataaaaatggtactcataaacttgccataagccgtgggaggcacagaaaaatcaatgatacggaatgtgttctcactatgaccactgaaatcaatattcggcgtcccggtttctagcaattcgataaattgcatatgtttactgccgatagattttaaaaaatgataaacctcaagagggtaatggacattaacgttattaatgacggttaacgtattaaactctacttgataacttttcagacgctcgatggctgctatcacttttgcaaaagtaccgttaccactattactgcgtctgtaacggtcatgtaactcctgggggccatcgatgctgataccaaccagaaattcatgttctttgagaaaggcacaccattcattattcaataaaatgccattcgtttgtaatgcattaaaaatacgtttttggcctgcatagcgttgttgatagtgaataactttacggaaaaaatccaggccagccagagtgggttcaccgccttgccaggtaaaatagacctgattgccagacgctgcgatatattgtttgatgaactctttcagagtgctgtcatccatccatttttcatgagtaaactggctctctttttcaaggtaaaaacagtaatcacatttgagattacattgaaaactggagggcttggctgtaacgtgcatcgctatctcgctcaataaggcggcggaaaaatccgccgcatgaaggtttagttatttcgcttcgcttagtgctttcttgatattgttaaacttctcctgatttacctcgctaagcggtggctggctgctgtcgataaactctcttaccacgccttgcatctctttaacgacctgcggattggcggcggcaaggttatctttttgctgtagatccgtcagtttgtagagacctaactgattgttttctactgtatagacaaggctataatcgttatttctcaccgtataagagaattggcttaagtcctcagtgttggggttatgcgggtaatcgtcactctgatggcgaacaaatttgtggtaattatcccagaatggaatattttcctcgtcaaaccagtgagaataagaggttatccaggtcagatttttatgtggctcgccttgtttcttatcttgcaaccagggcagcaaggaaacgccatccagcttaaggtcttttggaatgctgatatcggctgcatcaagagctgtcgggtagaaatccattgcggaaatcagcttgtcataattaccgggttgaagttttcctttccaccacataaacattggggtgtgagtaccgccaggataggtctgactcttatagcctttttgcgccccgttcagcggcagaggaccatcgataaccgcaccattatcggaggtaaagagaataattgtattgtcatactgtccgtttttcttcagttgttcgagaatgcgttttacaccctgatcaacagaataaacggaagcgtagtagttatctgctgtttgactaccggtattaaattgcttctgatattgatccggtgcaggattatcatttggcaggtgcggagcattataagccaggtaaagcataaaaggctggtcaagtgttttggcacgatcaacaacgccaattgcctcatcggttaactgatcgctgatataaccttttgcggggacacgttcacgatttttgaacagactaggggagttgtaatatgccgttcctgcagcgtggaatcccataaagtaatcaaagccacggttttgaggttgccattcttccgcagaaaatgtggtgaagttgtcatgatagtcacgcgtttgtttatcttccggtaccggcacattactgattttactcaagtgccatttacctactgctgcagtgtaataaccatgattctggaataattcaggcaagaaagtttctgttagcggaataccatcctgagcatcggtattggaatagacaccaaagcgggcgggagctcgaccggtcattattgcggcgcgggaggggccggaaacaccgtgtgccacatagccgttagtaaaacgtacgccttcatccattaaactaaggagcgtcggcgtacttttttgtgcagcttcaatggctttatctatccctattttgtaggtatcgacaacttcacgattttccattgtttttgggtcaaaagatcccttatcaaaaggaagttgtccataaccaagatcatccatggtcagtacgataatatttggctttcctttggtactgtattctgtcggcgtaaagtcactgaaagcaacgtttgttttggttgctttcagctttacatcatctgccgcatgagcagcaaatgcagccataccagatgccagtatcaaagatatgctggtacttacgacacttttctttaatgcagacttcataaatgttcctcttcttattgtacttaattccaaagtaattttacgaagagaaataagtggatgtaagtgaagttagtcacataaagagatagcagatttagctaaaaaaagggaaaaaacagtccataaagcgttgacattactttctgttctattaagtaatttctcgccgataaacaactaatttattgatatttaataaattattgcattttactgacaaaatgcagaattgagatcataaataatcatgcaacaggttatgcaagtgcataaatatgtgatggatgtcacttatttatttcaataaatatatcgcctaaaaacaacgcggggcagggaatggctgccccatttaattcttacgcagcgtgtgtggttgactactcgttagcaaataatcaaatagctaaagcattcatcgtgttgcccgtattcatacccgtgtgactttgacaacggtactccttagaaactctcttcggactgttgccgaaatgtttgcggaacgcataaataaaataagatgtactggcataaccacattgttcggcaattttattgacactaccttctacgcgtatcaaattttttgcgtgctgcattcttgcatctaaaagaatctgactgaatgtcgtttgctcttgcttaagttttttcttcaacaggctttcactgatgtacaggcagtcacaaatatctttcagcttccatgggtgcgccggcttcatgttgacaatatttctcactttcccagaaacggatagcacaccgttagttaatagtgtaatgaaacctttgcatgcggcaaaaatagacaggcaagaaaaaagcaaaagttcactaaaattatgatgattgcgttcttcgctgttgagataagcaatcatttcattaagcaatccagtcggtacattactagcacgtaaaaacttcgcaggaacaggcaccgtcactgtctggatgttagtgcattgtagatattttttaatggtattttcagtaaatccgatctctttaaaatgccgctcataaggttcaaaatgcgtacgaacagcgttatctaccatcaggatctcgccgtcagagaaggcgtaatctttatctaaaatgttagcgttgaaggcatgatgaataaatataacagaacaaacgaggctcattttatctccttaaaacaataaagtttttatcgatacttttttaacatttcatatttataatttgctgtttgttttcagccttgcaaactattgataatgaaatgtgtaagatctcttgcaatgcgacccatttctgaaatactcagctgatcaattgccgaaaaaatggctatcaacgtaagtgtcagtaataagacaaccacaattgcagacatgatttctttatagttgtctctttgcgtgattttgtttttcactgtggtcgcatgcatttcaaatatgtttatttagcggataacgttaaaaatcgttaatcagtatgcttaatataacaggctggagaaaagaggaaataggactggtgcttcagtactgagcggagtttcttacagctgtaggcagaagtttatatcttatagtatgtagtttaatttaatccatgtgagcaaattgcgaaataatagtcaatgaggaattcttctgctgtgcggatgacagcagaagaaatgagaagaggcattaattacttggttctaattcaaccggaatacttttatagccaggaatgccacttaatggatcgtggttatcaagtgttagcatgtgattgctttctggaaaataggtcaccagactgcggtcagccatagggtaaatgaccacttttaatctatccatgcggcgactgctgcgcttaccgtctggcgtaagcgcaataagattaactctttcgccgttttttacacggcaaattttagcttgtttagcactcataaagaccacatctcgttgaccgaatacccctcgatagcgatcatccataccataaatcgtcgtgttgtactgatcgtggctgcgtactgtcgccatgaccagcttactgttaaacgcactagagggatcttctaacagccctttgctggtaatgaaattagccttaccactcggcgtcatccagcgcctttcagcagctgcatttatcaggtgaaaaccaccgggatgacggatgcgctggttatagtcggcgaactctggcagcacagcttcaatgtcattgcgaatgcgatcataatcttccaccagatactcccaggctaccacgctctggggtagtgctgcctgcgcgattcccgcgaccactgcacactcacttttcagcattacaccggcgggttttaacacgccacggctggcatgaatcatgctcatactatcctcaacggttaccgcctgcgcaccgtttttttgcatgtcaatctcgctacgtcccaggaccggcagaatatagctatgccgtgcggtcaacagatgagagcggttaagcttagtggctacgtgtaccgccaaatctaattgcgttaacggtacagcgctcgcttcccgatctggcattgccagcgcaaaattgccccccatgcagatcaatgctcgagcctgccccgtacatattgcttgcatgctggcaattgcagcatgtccaggtgcatgaggtggggtgaagccatagcgctcacccagacgagccagaaactctgcagacggtttctcggtgataccgacggttcggtcgccctgtacattagagtgtccacgtagtgggcagatacccgcaccaggcttgccaatgttacctttcatcaacagcagattgaccagttgctgtacgttctgggtaccatgttcgtgctgagtgatccccattccgtaacagataatggtgcgttcggcagcggcatatgcgtcagccagttcggcgatttgtgtctgacttagtccagaaatacgttcgatatctttccactcggaattgagaacgtcacggcgtagctcgtcaaagccgacggtatgcgtttgaataaactcgtcatcaagcaaactaggccgacctgcggcgcttgcagcatcatcgcgctcaattaacaggcgcatcatccccttgagcaacgccatatcgccaccaatgcgcacgttatagtaggcactggccaactgagtctcagagttcgtcagcatttcaaacgggttttgcggtgcggtaaatcgctccaggccacgttcctgtagaggattgatggcgatcattttcgctccccgtttcactaaagcgcgcaagctagtcagcatgcgagggtggtttgtaccagggttatgcccaatgcaaatgactaaatcgcacttctcaaagtcttccagcaacacggtccctttacctacaccgatactcgctgccaaacccacgcttgtcggttcatggcacatgttggagcagtcgggaaagttattgctcccgtattcacgggcaaaaagctgataaagaaaggcagcttcattggaagtgcggccgctagtatagaattcaacctgattgggatcactatagctttgaaggcgtgcgccaatttcgtcgaaagcttgttgccagcttaatggcttgtaacagtcgctgacggcatcatatttcaaaggctgagtgagtcgccccgcagcctcaagctcgtggtctccccaggtaagtaaactttgaaccgtattctcagcaaagaaagaggcgtttacctgcttatccgtgacttcccaggcgattgcttttgcgccgttttcacaaatgtcgaaactcgcactgtgcttaggatctggccatgcacaacccggacagtcaaagccctctggcttattcatgtcaaacatggcaataacatcctggcgtatatccatctgcttacgtactgcattcgctacggatttaacagcaccccaaccacctgcagcaccctggtaggattcaatttttttcttcatctacttatcctgtgtggaaatgaattattaggatttgtaatagcgatgatgcacagtacatacaaagggattatcgccaacatggatatataagagtaggggactactctctttctatttttaatctattatcgttaaacaatagattaaatacgataagttaagcatcatctctcatagtgtttaaattaacatatttttcaatataaaaaataagactctggcttcaattgtgcgcggattttcttacaggtgtaggctaatagccttcacaaaataattatccgcgcaattttcgtgaatggagcgcatagactaaggtcaaaatcacaattattcatagataaaagtgacaccaatgacactctggacggttccggcactaaccttgtttcctgtttgtccataggttgcgcttaaacccagaggtactttgcttttatttactgtccccagggagacattttctcccgtagccagtatttttccattacgcattagagtgacacccactccgcttgcttttgttgcatcaggtgctgtgttagcaaacacttgtcggctactgtcagtggtggcaccgctaagataaaaactgagcttttgttcgctactgcaatatacgccaaggggtatttctgcgcttccaggaaagtccgggagatccacggtgacatttcgactatcaacggtgcagccgcctgttggcataacaacattgttattactaataatattccacgtaaaattacgcggatttccgcttcctaatgttgcaattttatacatatgaatacgggcaatgacttcccccgcttttatgacaactccaccggccgccccaactggggtaatatagagttttaacggtaatggcatcggtgtcttatcaccaatatccaatacgttggtatttgtcgtcaacgggaaggggtaggtcacattattccagtacaggcttcctttataactctgtagggagcctgcgaaagcactgccttgtaccaggtttatatgatcagtgtcgtaccagccgccgtaatcattccagcaacttatatgctgagacaagtctacaaccagattctggcccggctgtattacagggtcgagattaacataaacagaggttgtacctgctccaatactactcccgccatcgacattacaactgaaggcaaaaactttgcctgccattaatagaagataaataccgaacaggacctttatactgattgttttacccatgatatatcctaaggttaaaaattgatttaaaaagaaggctaagaaaatcgaatcgacgttattgccaggtgtagatcacattgattagcgcctcgatcgttccctggcttgcgtttccattcaccgtgatagctcttgccttaagtggaaactgtgcattacgagtgatctcatcaacaataaccgttttgctatcgccattttttaacgcagcatcctggtcatccctcagctctatctgaatattttcggcagtaccttcatttttgtaataacccgtattgtcagtactacctgtcacgattgccgtcactgcacttgtttcaaccggacaatcggttaaactcaaagtaatattgtgccagccagatgcagaaccaggttgttgcagattgcgcgtataaagatccccgagattaacgttagcttctttggtttgaatagtgcagggtttagcgactacccgaccattaacagtgatagtgacatcggcggcctggagagttgctgtgaataacgcgcaaaacgtagctaacaggaacctcttgtgaagtcttttcatatctgactctgattattgaaattcaagggtaaaggttgcgctagccctcaccagtcccggattgacggacttctgagtactcttcagacgagcggagtaaggcaaaatattgttctgttctggtaccagtgggatccactgcatcccggcatgaagatcattcagtttcaccggacgcatatttgcgtccaatatttctatacccaaaccggaggccgtattgcttccttcatccagtttcaacaaagtattattttctgcatcctcaataccgttaaatgcaacccgaacccccgttgtccctttgctgcattcacttaacgtaatctgaaaagggacggctggacttgtgctaccggtcgttggaaattgtctggcactgtttttttggagatctacggtaaaattaaggctatcgctactgactgtgcagccataatcgaggacgcgcccgctaattttaataacgctatctgcggataaagcagaataggtggttaaccccagacataaaccgaggaaaataatgttattgtatttcataatctattgttccttagcgacagattgctgtctgctggttcagtaaggtaccaggagaaacttcaggaagcttgtactcgacaatacagttactgtttttatctttgccccaactaacctgtaattgcccactctgtggaagtccagtcagataaacctgaccattttccgcgacaatgctgccatttttattctctccgtgtgtgacaattgcaccgaatggaacgctcttattaccgtacttcaacgtcattaatactttcccgccgatttgtgcattaaatgttgctctggcaatagcaccgtgagttgggatgacagtgaccacggtttcatccagttcaacattatctgcaagggaattcgcgttaagagcaacacggttttctctatattctgtcgcaaatggtaatatggcatagccacgccagtcggtatgaattccggtctggttctctattttgacattatcagcaccaggagccttaaccagaaccattgtgtcgcccagcggctgtccaaaggtgatgccatcagcatgagcaataatcccaccactcattccgtaataaatctggctgctgtcaccactccgactgtaaccgacattagtattaccataagctccacgataattaagagaactgtaaccactggtgccagagcttgtattacctccgtgggtgttaccgacctgaacgctataattcaggttattatccggcagcagagtgccataaaccccgcttagattggtcatgccgcctttcaaatcgttactcatactgtaactggcgttactattacgaaatgcgctctgactgtctgtacgcatccaatgactgaagggaacattaagcgtaaaagcgagtaaatgatcccgatcgttttgccatatattattggaatagctgtaattcaggctagtcgtaatatcaccaaacggcacatttaatccaaaacttatttgctggtcgctgcgactcgtgttccagtaactttggcgactggcactgaaaaatgtcgtaccgtaatttccaagctgctgagagatgcttatttgttcctgaccacgcttactgtagaacagattaaaataatcaataaattgtgtctgctcattggtgtctccggtaggaggcttgacggtgtaaccactcattcgactgtaggcactgtcggataagttataaaaaccttgcgtagaatagcgatatcctgcgacctggatattggttccacaacaagtttattgctgcacttgttgaagagagtatttgcaaaaacattttatgtcgctaaataacatgacgatttcattatgcatgttatttataaaccgtgactaaacagaatattattgcgaacaagggaagtgtcaggaaaggtcaagagctaccaatggttaatatggctataaatcattagctatggttaatgtttgcttgctgaaactaacaccgaattgctctaaacagataagtgcagggtttattaaagctgtccgacagactttcttaacctggtaatatctctcttgggtgactctccaaacatccgcgaatattcccgacactaatgggatagctttcgtaaccgacagcataggctgctgtggtgacatcgtaatgttcattcagcatctgtcgcctgacttcattgagacgtagccatttctgataccggagtggactcattcccgcttgatccgtccttaaataagtaacagcaccctctggtgttttcgtatgcagtgtctatgcgacagacactgcgctcttagcatggggcagggaataaccaggctatttctccatgcacaggccaattatgaaagaggagaggcttaagttcttgaaccctgaacgaataacgactaccagaaaagcacttcgcatcactcagacatgatttaacataatatacattatgcgcaccaatataaaccaaggaagaatccagtcgttggcggtcatgattgtcatgctcattaacaatgaccaaaccccatatctcacttactaccgtattctcggcttaaccgtccatgcaacctcaacacattgctttcaactgccgtcaccacgttctccggaaaatctgtcggtaaactagtcttcacgttatccagtgctgctggaatcattctggcaaagtcactcaggatttcatgcatctgcacttccgggaatctcagcacctttgctgtcgccaaaaaatgtcgcggataaattttatcgattgccgtttttttgcctttggatgcgttaagccccattgccagtttgagatcgctgatgtgtattcccgtaccgccaaggaccggaaatgcactaatgatgtcgtaaaatggcgtgagtcgataactgccgccagcctgaataaatacggagaagttttttgcatgaccgtccgttgcgccaatcaaccactggaagacctggaatttcataaaatcatagcgatctttcagcgcctcgctggaccccatcaaaaaagccatgatccgcgcgatgcctgggcctccatcactttcatatttcacgctactaggtaaaccgaatgtctgacacatatcctcctgtggcaagcgaagtaaaaccgttcgctcagcattccaacgcctgtcaaaacgttcgaccgctaacgcgcgcacatttcccgctttaatgatttctgcgtccggaacattcaacccaagttctttcgccagcagcagacagtaatactcattatcaacgctttggctgagatcgagcgtcgcattgggctgcctgatttcgccaatcggtaatttaatgatgtgcgtcgtcggcgttattcctttcggaatgcaccagtcattgcctattctgagcagtgctgtcttctcctgtgcgccagcaacgctgatgcgaaagtcattttcttctctaatcatgcctagcgggatatctgctttataagccgttaatacttcttcaagtctggcttcagtaagcttttcccatgccattatcggatgcgttacggtttcgtcttcgggtattaacgtcacggcaccaacgctgtctcgccctatttcactcaataaatcaaacggttgtctggatttggcatgataacgtttaacgatccggtcacgtacaatcgggctatcgggtaacaggttatcgaagaagttaaatacggcatcagaggtgatattccccctctgcaatggcaggctaagactcaacggtctggcataacggcttgctaaccactccggtgcatacttaaaggtgtgcgcgccgttggctaacttcgttaactcgcctacccgctggttgttcatccaagtgacaagtttaggcattaccactccagattttgctgttctgtactttctgggctggcatttttcgcgtcgcatagcgtcatactgagttcaaggctctgtaaaatcttaaaaaatgtcgtgagcgtggtattgtcagggttgttttcgaaattggaaatcgtcgcctgcttaataccaatttttttcgccagctcgctctgcgtccagccattttgctggcgaaccagtttcattgcattcgccaattgcgttgggctatagatcttctgaaagctcatcatgtcatacgtccacagcaagtttatccgcttaaggggatattataagttttatcctttagtgaggataagtcaatctggaaacacatcttatccgctctacgggataaacgctgcgatatccgcgatcgcggataaaaaggaggatttaaataaggcgttgatgcgccgtttgaagtcggcaatattaagccgcatgccatctcgacatgcggcttatacggtttaccagctatatttcactcccagcatgccctgagtatcgctatagcctttatcacctagttgcacaccgacattcccccacaggctaaggttgttatttactttcgcctcaaccccggtacgtacttcaccgagattacgcgcaccttcacggcctacggtttgaccattcatcttcacggcgtagactttgctattgttgatccagttcgcttcaatgtaaggctggaactcacgctgtttaccatcgtcacgctggtgatggctgttcaggtaggttttcaccccaagtcgcgtttgcacatttccgtcgccttccgtttcaatgcgcgttccgtctttccgggtatggtcggaatctttcacacccatccaggtgatttgcgcctgtggctggacgtaccaggtattcagcgtcccttcgctgccgctaaatgttcccgcttcaaaggtatacccaccctcaacagaggccgtcacaccgcgagaatcatagtcgtcagcagaacggttatcggaactgacgctgttatcaaaccagttatacagcgcccagctgtcaacataagcgccggtcttattcgcatcgttctgataccaggtcgcgtacagcccagcgctgtaaccgctgatgcgcccatcgcttttataacccacacgattactctgagtattactgtgctgattggcgtagcctgccatcacgccaagatgccagcgatcctgcgcgttgctactccactgcgccaaatcgccgcctagctgcaatacatagcggttagcctgagtatttagctgaccgtcaccggccctactacgttcgtgccctccgacatgacgcatccacatactgcttgcgctcccctgagaatgcagactatctgtatactgcggctcacccagacggtcgtgtaaacgatggctaaacaggctgttggctgcggcaatgttgctgatatagcttccggcctccgggcgataaacacttgggccttccggatccacaacagggggattattgatgggatcgggtgtatccgctggcgttacgccgtcccatttactggtcagataccagtttttctcgtcattccccttccctttagccagcgtgtagacgtaagccccagcttcgacagttccggtggtcagcgcgaagttacctgcagaattaccgccaacctcaatgagttcaataccgttgaccgtttgtgcaccgacgccgccaatgttatcaacccgaacgcgagtgttcccttgggtatcgcctttcacgttcatcttatcggtggggctattatcgccgcccagcgtcgcgttgaacgtcatcaggccattgtttccggtatagttgccgttaacggtcagtacattccccggtttccccccttcgctattcatttgaaccgtgccgccattctccaggttgccgccgatagtggttttagcgacacgcagtgccccccccaggcataacgttcatatcacctgcagtggtgacatttccgctcatcacaccgctgttatggatattaatgtgttgacttgccatattaatggcagagtcggaaccgaaagcaatttccccccccacgatatccgtcgtaccctgatatgccgcggaatcgttgttaagagtcaggatcccggtacccagttttgtcacatcaccgctaccgctgatactgtgcgtcatcgcccagctacgctcagtggagatggtgagcaggccattattgataacggaagcatcacccaggtttttctgctcgttgacgctgagcgcgctgcctgtatcaatgttgaattgccccacaaagcggctattatcgccatccaactctacatctgtcctggcggttgcgctcacgatacccttcccgcttatgctattacgcagttcgccagtcacgttttttagcgttaacagaccgtcattggcaatatttcctctgcctaacccctgagtattatcgaggctgacttccgcatttgggctaatgctggttaacgcattgtagcgtgcattaagcccctcgatagccagcgttccccctgtaacattcaggtttccgccacctgtcagttcaccctgactgatcccacctttatttaccgtcagcgccccctctttgaacaaaacagtgctacccatctgcccggtgaatgtctctaccgtctgcgtgcttccattaagatcgacgatggccgcgttgctgatgttcagttcccgggtgttgccaagtgcaccatccgcatcggtacgtaatgtccccatctgaacgtaggttgccccctgatagtcgttctgaccgttggaaaggctaacctgtcgcaccgtattgattgccagatccccttcaccaccgatttttgcgctcatatcggccgttgcgccataggctccgccatgttcggctaacgtcagcttttgcccaccatggatgttcagcgctttcagcccatagttaacgtacaaaccattacctggtgcggtcgtgaggcggaatccataatcaccctcggcgaccaccgttccgttttgcgcaatgtgtaacgttttgtccgcttccacctcgtcgccctgtaaatcacgtaacgttaaactgccaccgctcccaataaccgtttgcgccttcaccagttgaacgccgacatggctatcgtcgtgttccagcaaattgagcgtcgtcagagggttattcgccatgggatcattccacggtttaggcacgtcgataagcacgtcgcccgtcccgtttacctgatagttacggcctttccaggtgtagtcacccgcgccgacaaccagcgtatcgacgctgatatatccctccgcgagcgtcgcagcaggaatatccgtatcgaaaatgatggtacctccattcatggccagtccaccaatggattgctctccaacttttacgcttgtggtattttcactgtcagactgcaacatcgcgtgagtaagcgcagcggtgttgtcgcgttccagagtgaaggtactgtctttcagttgggcaacaccggcgaattcagtccctgttgcatgggtaaagccaaacatcttgtcggaggaactcagctgcactcgcatcaagccatcgcctttgagcgcattggtcagcgtgtaatctcctgcactgttcgtacttgcgagaatgtcgagcgtaccggggtttgcaatggttacttcactgctccccatgcccgttaccccatctgccgtatgagacgcaatggtcaggaggccgtcattgaccagcgttttaccgctataagtattccctgcattgaacaccgtatggcctgcatcatggatcacttttccgtctttatcgtcacctgtaatcagcatatcgacctggtagccggcatcactgttattggtatgattaaagacaaaaacgccttcgccaagaccaaactccactttcgtcgcattggtgataaatccggcatctgccgccgcctcaccgtgagcagcaccaatgtttagcgttcctacagcaggctcaaaaacacctaagtaaacttctccaccttcgacattcagcgtaccgttattcgtcagggttaacgtacccgtaccagatgtccctacgtacatattgaatgtttcaagaagagagttctgcccatccaccctcacgtcgcccttacttttgtcattgagagctatctgtgtatcacgcgctttaactatacctccggtggtaatattcagttcacccgtgcctaatacaccgacctgtagcaattgtgcgttagtagaacttgtctttaaattccagagactgtccgtactaatattaactatccccttaccggaggcatttcctccgataaatccatagcccgtactattaagggtggcaccattactgacatttacgataccgctaccaaaattaccgacattgatacccacagtatcgaagctacttgtcgcatccatcaggttcagtgtgccgataccgcttgctttatcgcccaaaaaagtaatattttggcttacgaacttaccgccatcgctaatattgaggtttccgacgcccgcaacaccaatggtggtatagacattcttattgacctcccacattccccccgtggtgatgctgacattcccgacgccggtttctccataaccgagactacttcctccgttgctgacaacaagcccctgattactgatattcatttcgccgtggccgtcataaccaagattagttccgagattagtgataacggagttcttatccttaacagtaatgttgcctgtgcctgtttctttcatccccgcagtgataattccgctatctactttgccttcactgctgacattaagttcaccgtcgccagcatcaccgatatagatatagcggaaagcttcgcccgttccgaggaaattccaatgccctttatcggtcacgttgacgacaccgtgggaaccgtcctgaacgcccaccaaactatattctttgttattaatcagtccattattggaaatattgactgtgccattaccgaaatatccattatagagtctgcgtaccgtgatgacagagtcttgatcctgcacattcagggttccgataccggtggcattgccaccgataatcgtattttcagccgtaaccaaccccccctcgcgaatagtcgcctccccagttccttgattaccaatttgaaattcaatactggaatcattattttttattagccactcgccacccttttcaacgacaacctggccattactgcccgcctgatagcctaaaatggcgacgatactactcgtgacgtaacccttatccgtaatatttaaactacctgtgccatagctacctatttcgaataattcggtcgtcagaacagagtcctctccctcaacattgaccgtcccgacgcctcctgtgctagaacctaatcttaaatagcctccatcgacgtgacccttctgtttaatattcagcgtccccgttccggattgacccacatttaaaggccttgcattatttccgctatcatacaatcgccaggtgccacccaaaacattaacggtgccctcactgtcctcattagcgccaatgacgctggtagtaatagtggttaaggaggcattaccgccagccaaaatattaagcactccagtgccataccagccaaccaggtaggcatcataagcaacatcagtatcaatattggtaatctgatcattatcaacttccagacttgcaccagacgcactaccgcttagtgccagcaaaacacccagcgtcaatctactgaatttcgttgtcagtccagaggatttacgcaaattaaccgtgcttgttttacctgccctgcgagttaattcgctgcaggcctgaaatacctgtagagtgcaattccatatcacgcgatagattctattcatataaacgctccatatacaaacaatacagccacgaaagagatgagtcgtcagacattaaaaatgaaacttattaaattgtcagaggtctgtattgagtgttagttggaggtgggaaggtgtcaatttggctaatttgctaatgctttcgaattgatagattaaaaattgcatagttcttattttatttaaatatgaactatgagttattgttgcttaataagaaaactgtttctttcaataggaaaattatcatcatcatatttaacaaagaatagcactaattgctaaaaatcgaagtttattaaaccccttttgcatccattagtgtctttaggaatattcgctataaaataagggttgtgcttaatgctttaagaaaaatagcaattttcccttgaatatcgtactggtgatggaacgatgaatctgcaagctggcttttaacaagccagctctaaaagaagggaaataagaataactatactcaaaaactaacagccacggtcatcatgatgtggctgtcaatgaaattataacccaggcgctttccataagctcgtcgtcagtccatgatcaaccagccccagctgatcctgataaactgcctgccacttatcgcgactatcctgataaagttcatgcttttccgggtctggtgtgtgcgtccgttcccagcgaaccaggcgttctccggtttctgccatactactaaaaattccggcaccgacgccagctgcaatggcacatcctaatgcagtggcttctttgaccaccggaatattgacgggtaatccgctgacatcagcgagaatttgactccataatttccctttactacctccgcctgcaaagactaagctactaggatgaatattgctgaaatcagcaatttgctgcaagttacacgcacttacaatcgccgcattttcttccagcgcacggaacaatgtcgctttgttacatttatccgggtcaatggacaagttaataaaggaaggcgcagcgtgataccaggttttaaagcgcattctgtcggagaagatcggcattacgccccagctcccaggcggcacccgactggccatctcttccagcagcgtataggtgtcgatgcctaaacgttcggcaatcagtttttcttcggcacagaaagcatcgcggaaccagcgcatggtgagtccggtaaaaaagcttatagattcagcttgtaccatgccaggaataacatgaggattaacgcgcacgttcatttctgggtctgtcaccggcgcggctaaatttacaacttgctgccagaatgtgccgccaagaaccgcggtttgtgccggacgcacaacgcctaacccaaggcaaccaagctgcacgtcgcctcctccaacgaccaccggagtgcccgccttcagaccgcagagttccgccgcttgactacttaccacgcccagcaatgtgccggtttctttgacaggagaaagaatatcggcacgtaggccagccatatccagcaatgcaggtttccagtcacgggtggttagatcaagaagtcccgtggtgccagcgttagagggatccaccgccagttcgccgctgagcatataggccagccagtcgctgatcatggtgatggtacttgcctgacggtaaatatcggaacgatggtgcgccagccaaagtaatctggggatggcacttaaagccagtgtttgtccggtcgcgcgataaacttcgttttcaaaggtattgttgtgcagttctttaagttcgctaacttcgcgtgccgctctggcatccacattggcgcaggcccagatcggggctccttcattattatataaaacaatgccttcacgcatgctacatgcgctaacggcagcgatatactccggggctatgccggcgttgtgcagcgcctggcgcatacactcacacgccagttgccagtttttgttgagatcaaattccatagaaccaggaacgtccggtactgccagatgccgccactccgcctgtcccactgctatttgattgccttccaggtcgaatatcacagcccgaatacttccggtgcctgcatccagcgccatcaggtagtacttactttcactaagggtaaagagtcgagccattagattatcctcggcttatgcgttctgtctgttcctctatacgttctccatcattcccggtaataaggtcatgcaaatttaactacgtaaaatcgccgctgctgtgtcctgatcggtaaccagtgcgttgatataaccgcctttcattgcagcggcaattgcttcggctttattttctccccctgccacgccaacccggacgggtatggtcttcagcgcgcttaaaggtaagccaatcagttcgttatgtattttgatattcgtgacaacgtcaccttttgcatcaaaaaagtagcctaaaatgtcgccaaccgccccttttcggccaatcattaactgttcgccctggctgatataaccggagcgaatgattgtcgcatcgtcctgttgactcacagcaccaatgccgacaatcgccacatccgctgcttgcgcggctaacagaacatctttgacgcaattttcattttttagcgtacgggcaatgtcagcggaggatgcccgcaacggagccggaataatattcacactgcacgccgcgttaagctgcccgattcccgtcatataagaaccgacgccaccggagagcgtgaccaggcgaatttgctgactgctaataaaaccacttaagcgttgcagcgtattcatggttgcctcgccaaaaccaatcgccagcatctgttgtggttgaagtaaactcatcaacatatgcgccgcgcctatccccagtcgcccaccgacatcagcatccgcaagcccagggatcacccggacatgttgcaggctaaactgacgacgtaattgagtttcatattccagacagccttcaaagcgagaattaatctgtacgcgaataatgccggactgatgccctttctccagcaatcggctcactttcaaacgtgtcaggccgagacgatcgctgatctcgctctgggtcagcccgtcgtgatagtaaaaccacgcgatccgcgcgacctgttcttcttcacacattccctgttcactaattgcgctatcgttgattgtcataattcattcttcactttgaacatatttaaatctttaatgcaattgttcagttcttgctcatttatatctgtgatggcaaccacagtttgactctacgagcatgaacaaacgcaaccgtgaaaatcaaaatagcataaattgtgatctattcgtcggaaatatgtgcaatgtccacctaaggttatgaacaaattaaaagcagaaatacatttgttcaaaactcacctgcaaaactgaacgggggaaatatgcaaacgagtgatacccgcgcgttaccgctactttgcgcccgcagcgtttataaacagtatagtggggtcaatgtcctgaaaggcatcgattttacgttgcatcagggggaggtccacgccctgctcggcggcaatggtgccggtaaaagcacgttaatgaagattattgccggtattacccctgctgatagcggtacgctggagattgagggcaacaactacgtcagattaacgccagttcatgctcatcagctgggtatttatctcgttccccaggaaccgctgcttttcccaagcctgagcataaaagaaaacatcctgtttgggctggcaaaaaaacagctctccatgcagaaaatgaagaacttgctggcggcgctgggctgccagtttgatctgcatagtctggcaggaagcctggatgtcgccgatcgccaaatggtggaaatcctccgcgggctgatgcgcgacagccggattctgatcctcgatgaacctaccgccagccttacccctgcggaaaccgaacgcttgtttagtcgcttgcaagagctgcttgctactggcgtgggtattgtttttatcagccataagctgccggaaattcgccagattgccgatcgaattagcgtgatgcgcgacggaaccatcgccttaagcggcaaaaccagcgaactgtctaccgacgacattattcaggccatcaccccagcggtacgggaaaaaagcctctctgccagccaaaaattatggctggagttacctggtaaccgcccacaacatgccgccggaacgccggtgctgacactggaaaatctgaccggcgaaggtttcaggaatgtcagcctgacgctcaatgccggagaaattctgggcctggctgggctggtgggggccggacgcacagaactggccgagacgctctatggtctgcgtactttgcgtggcggacgcattatgctgaatggtaaagagatcaataaattatccactggagaacgtttactgcgcggtctggtttatctgccggaagatcgccagagttccggactgaatctcgatgctagcctggcctggaacgtctgcgcccttactcataaccttcgtggattctgggcgaaaaccgcgaaagataatgccaccctggaacgttatcgtcgggcgctgaatattaaattcaaccaaccggaacaagctgcacggacattatccggtggcaaccagcaaaaaatcctcattgccaaatgcttggaagctagcccgcaagtattgattgtcgatgagccgacgcgcggcgtggatgtcagcgcccgtaatgatatctaccagctgttgcgcagcatcgccgcacaaaatgtggctgtgctgcttatctcctccgacctggaagagatcgaactgatggcagatcgtgtgtatgtgatgcatcagggcgaaattacccactctgcactgaccgagcgcgatattaatgtcgagactattatgcgcgttgccttcggcgatagtcagcgtcaggaggcgagttgctgagctaaagtcagcgtcaggaggcgtcatgctgaagtttattcagaacaaccgtgaaatcacggcactgctggcggtggtgctgctgtttgtattacccggttttctcgaccgccagtatttaagtgtgcaaacgctgaccatggtttatagcagcgcgcaaatcctgatcctgctggcaatgggcgcgacgctggtaatgcttacgcgcaatattgatgttagtgtgggtagcattaccggaatgtgcgcggtgctgttggggatgttactgaacgcaggatatagtctacctgttgcttgtgtcgcgactttactgcttggtttgctcgcgggatttttcaacggtgtcctggtcgcgtggctaaagatccctgccattgttgccacccttggcacgttagggttgtacagaggcatcatgttgctgtggactggcggcaaatggattgaagggttacccgccgaactgaaacagctctccgccccgctgctgcttggcgttagtgcaattggttggttgacgataattctggtggcatttatggcctggctgctggcaaagacggcgtttggacgcagtttttatgccacgggcgataatttacagggcgctcgtcaactgggcgttcgtactgaagccattcgcattgtggcatttagcttgaacggctgcatggcggcactggcgggaattgtgtttgctagccagattggttttatccccaaccagaccggtaccgggctggagatgaaagcaattgcagcctgcgtgctgggcggcattagtttgctcggtggttccggtgcgatcattggtgcggtactcggcgcatggttcctgacgcagatcgatagcgtactggtgctgttgcgcattccggcatggtggaatgattttatcgcgggtctggttctgctggcggtgctggtgtttgatggacgcctgcgttgtgcgctggaacgtaatctacggcggcaaaaatatgcccgctttatgacgccaccgccatccgttaaacccgctagcagtggtaaaaaacgggaggccgcataatgcgtattcgctacggttgggaactggctcttgccgcactgctcgttattgagattgtcgcatttggtgcaattaacccgcgaatgttagatctcaatatgttgctgttcagcaccagtgactttatctgcattggcattgtcgccctaccgctaacgatggtgattgtcagtggcgggatcgatattagctttggtagcaccatcggcctctgcgccattgcattgggcgtactgtttcaaagtggtgtgccgatgccgctggcgatactcctgaccttactgctcggcgcattgtgcgggctgatcaacgccggattaattatctataccaaagttaacccgctggtgattacgcttggcacgctgtatctgtttgccggaagcgctctgctgctttccggtatggccggagcgacggggtacgaaggtattggtggattcccgatggcgtttacagatttcgctaacctggatgtgctgggactccccgttccgctgattatcttcctgatatgtctcctcgttttctggctctggctgcataaaacccatgccggacgtaatgtgtttttgattgggcaaagcccgcgcgtggcgctttatagcgcgattccagttaaccgtaccttatgtgcgctctatgccatgacggggctggcgtctgcggtcgccgctgtgctgctggtaagctattttggtagtgcacgttccgatctcggtgcgagctttctgatgcccgccatcaccgccgtggtgcttggcggggccaatatttatggtggttccggttccattatcggcaccgccattgcggttttattagtgggatatttgcaacaaggtttgcaaatggcaggagtgccaaatcaggtgtccagcgccctttccggtgcgctacttatcgtcgttgtcgtaggtcgttccgttagcctgcatcgccagcaaattaaagagtggctggcgcgtcgggccaataacccattgccataaaggatatcttcatgacacttcatcgctttaagaaaatcgccttacttagcgctcttggcattgccgcaatctctatgaatgtgcaggccgcagagcgtattgcatttattcccaaactggttggcgtgggattttttaccagcggtggcaacggcgcacaacaagcgggtaaagagctgggcgttgatgtgacctacgacgggccgacagaacccagtgtttctggtcaggtacagttgattaataacttcgtcaatcaaggttataacgccattatcgtttctgcggttagccctgatggcttgtgtccggcactgaaacgcgccatgcaacgtggtgtgagagtgctgacctgggactctgatactaaaccggagtgccgctcttactacattaatcagggaacgcccgcccagttaggaggtatgttggtggatatggcggcgcgtcaggtgaataaagacaaagccaaagtcgcgtttttctacagtagccccaccgttacggaccaaaaccagtgggtgaaagaagcgaaagcgaaaatcgccaaagagcatccaggctgggaaattgtcactacgcagtttggctataacgatgccactaaaagcttacaaaccgcagaaggaatattaaaagcgtatagcgatctcgacgccattatcgcccccgatgccaacgccctgcccgctgccgcacaagccgcagaaaacttgaaaaatgacaaagtagcgattgtcggattcagtacgccaaatgtgatgcgcccgtatgtagagcgcggcacggtgaaagaatttggcctgtgggatgtggttcagcaaggcaaaattagtgtgtatgtcgcggatgcattattgaaaaaaggaagtatgaaaacgggcgacaagctggatatcaagggcgtaggtcaggttgaagtcagcccaaacagcgttcagggctatgactacgaagcggatggtaatggcatcgtactgttaccggagcgcgtgatattcaacaaagagaatatcggcaaatacgatttctgatgtgcattacttaaccggagtaagttatggcagatttagacgatattaaagatggtaaagattttcgtaccgatcaaccgcaaaaaaatatcccttttaccctgaaaggttgcggtgcgctggattggggaatgcagagtcgcttaagccggatatttaatccgaaaacgggtaaaaccgtgatgctggcttttgaccatggttattttcagggaccgactaccggacttgaacgcattgatataaatatcgccccgctgtttgaacatgccgatgtattaatgtgtacgcgcggcattttgcgcagcgtagttccccctgcgaccaataggccggtggtactgcgggcgagtggtgcgaactctattctggcggaattaagtaatgaagccgtggcgttaagcatggatgacgccgtgcgcctgaacagttgcgcggtggcggcgcaggtttatatcggcagcgaatatgaacatcagagcatcaaaaatattattcagctggttgatgccggaatgaaagtgggaatgccgaccatggccgtgactggcgtgggcaaagatatggtgcgcgatcagcgttatttcagcctcgcgactcgaatcgccgctgaaatgggggcgcaaattatcaaaacctattatgtcgaaaaaggttttgaacggattgttgccggatgtccggtacccattgttattgctggcggtaaaaaattaccggagcgcgaggcgctggaaatgtgctggcaggctatcgatcagggcgcttctggtgtggatatggggcgtaatattttccagtctgaccatccggtggcgatgatgaaagccgtacaggcggtggttcaccataacgaaacggctgatcgggcatatgaactctatctgagtgaaaaacagtaactgcggatctaaggagaagaattatgcacgtcacactggttgaaattaacgttcatgaagacaaggttgacgagtttatcgaagtttttcgccagaaccacctgggctctgtacaggaagaaggcaatttgcgcttcgatgtcttacaggacccggaagtgaatagccgcttttatatctacgaagcctataaagatgaagacgcagtggcgttccataaaaccacgccccactacaaaacctgtgtcgcgaaactggaatctttaatgaccgggccgcgtaaaaaacgtctgttcaatggtttgatgccgtgaggcgaatttatcaattttatctacaattggggtaacgcgctgacgggagtaaaaaaatgtctgactggaacccctctttatatctacacttttccgctgaacgaagccgtccggcggtggagctgcttgccagagtgccgctggaaaatgtcgaatatgttgccgatcttggctgtggcccaggtaacagcaccgcccttctacaacaacgttggcctgcggccaggataacaggcatcgacagctctccggcgatgattgctgaagcgcgcagtgctttgccagactgccagttcgtggaagcagacatccgcaactggcaaccggtacaggcactcgatctgatttttgctaatgccagtctgcaatggctgcccgaccactacgaattgtttcctcatctggtttctttacttaatccgcagggcgtgctggcagtacagatgccagataactggctggagccgacccatgtgctcatgcgcgaagttgcctgggaacaaaactacccggatcgcgggcgtgagccgttggctggcgttcatgcttactacgatattttgagcgaagccggatgtgaggtcgatatctggcgaaccacctactatcaccagatgccgagtcaccaggcgattatcgattgggtgactgccactggattacgtccgtggttacaggatctgaccgagagcgaacagcagctttttcttaagcgctaccatcagatgctggaagagcagtatccactgcaagagaacggacagatactgctggcatttccgcgtctgtttattgttgcccggcgtatggagtaaatatcacgtcagctggtaatgacgatcgggaagaatttttgctggaatttcggcttcatcgttcatctgtaacaggtcaatttcaatagcgttgcagatggcatccagtggtaaatcattgttttcagtaccgaacggatcttccagttcttccgccagacaatccaggctaataaaagtgtaggaaatcagcacagagataaaaggcgtcatgtaatgcaggtccacgaccagcgcgaacggcagcatgatacaaaacagataaacggtacgatgcaaaatcagggtgtaggcaaagggaattggcgtataggcaatgcgctcgcatcctgccaggaccgcactaatatcattaagccgatcgttgaggctaataaacaggatatcactaagctgtccattgcggcgctgaaccgccaaccattctcccattattaacaagatacggttagctggagagttgctagccagtacacgctgaagatcttcagtcttgagataatgagccagcacttccgcctgtggctgtttgcgtaatgtcatgcgtaaacagtgggcgaaagcgatttgcagccgggcaaactcccttacacttgcgctatccggcaatgtcgtttttacctcgcgcagtaagctccgactggcaatcatcaactgcccccaaagttttcgcgcttcaacgtaacgggcgtacccggcattattacgaaaaccaagaaaaatggcgatggcgacaccgagaatgctgaacggtgcgagggtgaatttgatgcccagatgcgtgtaccagggcagcatgaaaataacagcgatagaaaagagaaaattgagtagtaagcggctggatatcttggataatacactgccgtgccagacaaaaatacggcgcagccagtgttgttgtggacgaacaatcatggttatcttcaggcgtggaaaagtcgccctattaaacgtgattacgatcacattctcaagacgctacttacaaattacctacaagcttacaacattagcaggcgctgcatgtggcacctgttaatgataaaggcatataggatgttgtaactaatatggtgaaataagaaacccggtcgaaaccgggttcagaagtaacggtgttattagcacaacggacgtacagcttcgcgcatccctttttcgagaatcgcatccaggtcattagcaacctgctcgaccagaccaggcacttgcgtcaggtcctgctcccagtggtctttttctgccaaaacaatcgctaccagttcctgggtgccgataacacggtcacgatgctggctccagagttgctgataacgttccagccagtgtgcatcgtcctgtaccggatatgtttcgccgttacgctcaccacgatagaacgcaatcaatgccgctaatgcgaaagtaaggcgcgccggaagtgtgccgtttgccttctgccctgccagcagctgtggcaggatgcgggtgcggaacttggtcataccgttgagcgcgatagacagcagctgatgcttaatgtacgggttacggaaacgcccggtgactgcactggcgaaagattccagttcatcacgaggcaaatccagtaccggaataatttcttcgtagatagctttttcaacgaatgcgcaaatttcagcatcgttcatcgcttcacctacggtatccagccctgcctggaacgccaccggcaccagcgcggtgtgcgcaccgttgaggattgccactttgcgttctttgtacggtttaatatcgtcaacaatcagcacgttgagcggatatttgtccagacgcagttcagtcgctaaggatttcggtccctgaatcacaaacaggtaaaagtgttcagcggtgtcgagaaaaccatcgtgataacccagttcttcttccagtttagccacttcatcgcgcggataaccggtaacgatacggtccaccagcgtagaacagaagctgttagcctgatccagccattgaataaatgcttctggcagtgcccactcttgcgcatagcgcagcaccagttcacgcaacgcgtcgccattgtagtcaatcaactcacacggaatgatgatccaacctttatccagcgcaccgttgaaatggctaaagcgttcgaacagcagacgggtcagttttgccggatagcttaccgctggcgcgtcatcgaatttatcgcccgcatggtagctgatacccgcttcggtggtgttagagaaaacaaagcgcatttccgggttgtgcgccagtttcaggaattcatcgtattcactgtagacgctgatttcacgattaacgctgcgaatcagacgcgcgtcgctgaccgcttcccccttctcattcaggccacggataatggtggtgtacagaccatcctgcgtgctcagactcggcgggaaactagtttcaatcggacgaacaacgaccacgccagaattcagatcggtgtgctcattcaggagatcgatttgccagtcaacaaaggcgcgcaggaagttaccttcaccaaactgaatgatacgttctggatactgtgcaccgggaaaatcgcgacgatttagtgttttcacaatgggttcccttctgattagtcatacaacctgtttgaattggtacgacaggttagcaaactttaatacgccgaacccctgttttgatcaactcctgatgattaatgagcagttttatgagaaaagtgtggcgcggatcatggtttaatcgaggaaaaacgccttttcctggatcataaagtggtagaacacattgcattcaaatcgcgcgtaatgaataaagatgtcagacaacttcctcaccgtaacgcatagtgctggtacggttgcgcccatctttcttgctgcgatacagacacgtatcggcttcgaccatcaatttattaaagtcatcggtcagcgttaggtagcttgcgcgaccactaccgacgccaatacttaccgtgagataaagcgttttttgttgccaggtgaatggttgcagttcaacgcctttacggattttttccgccattagcagaccatcgacaggattcacgctcggcactgcaacagcaaattcttcgccgcccattcgcgccaccagccccttatcaccgacaatcttctgaatatgccgggcaaacacgcttaacactttatcgccacattcatgtccatagttatcgttaatgcttttgaaatagtcgatatcaagcagcatgacagtcagatgttgtgtctgtttcaggcttggacttttcagcgcctcataaagaccggaccgactgtaaacctgagtcagaaaatcaaagtcggctcgcagcgcaacttgcttcattaggctattgatcgctgccacgctaaaagaaaccataattgggcatatcgccatcgtggcaataccgagacgtgcggagaacatttgcggaatggagaacgggctaccgacgctgatatcaatcacgctatttgccaccagtacgatttccaccgcaccggtgacaaaggtcaacagacatgttacctgcggcgtatagcgcactgcacaccagattaatgcaggcagcgggaacgccagactccccgctccgccaatgactacgctggcaataacgctcacaataagcgcgatggcgggcatcatctgttctgctttaaagcgcggcagcactccaggaatagccaacgtcagcatacaaggcacgatcaacacgcccgtactgaattgctcactgaaccagtccgcaagcaaaggccagaaatccagactatcaatactgaccgaaccaagatagcatgttcgctgacagcggcggcaaataaaggtaccctgggaatgctattttgtcgttttccgcaattctcatggctgattcatctgtacaaccagccagtgatagattaccgccacgatataacgttgttgttcttcgcttaagctaacaccctgcggaatgttatgccacttagccagacaaccgcgacagcaggtcgcggtggcgtgctgagcgataaacaccggatgcccgcgcatgggggtttgcttaccgtcattagccggtaatgccggagcaagacgtttagcgacaaaatccgccgcatgttgttcgatgactggcgcgcctttctccaggcaatactgacgctctttcatgcccagacgaaagcgagagcgaaatttactacgggataaacgcgcgaagagtggatcgagagactgcattaataaacgctacgccctaactgtttcgtcaattgttcaagaacggcaatacccgcaaggctgttacctgcatcatccagttccggactccagacagcgatggccatttcatgcggaacaatcgccacaataccgccaccaacgccagatttcgccggtagccccacccgccaggcaaactcccccgcgttctggtacataccactggtcgccatcagcgcgttaatttgccgcgcctgcattggcgtcaccactggttcatcaatatgaatagctttcccctgattagccagaaagacaaacgtccgggccagctctacacagctcattttcagagcgcagtaatgaaagtagttttgcagaacggttgtcacgtcatgatggaaattgccaaagctcttcatcagccaggcgatagccgcatttcgcgcggaatgttcaaattcggaacgcgctaccaccgtatcgtaggaaatatcagacacaccgcttaagccgcgcacgacttccagcatacgttgccgtggtgcgcttaatcgcccttgcaacatatcgcagaccaccagcgcaccggcattaatgaacggattacgcggtataccctgctccatttccagttgcactaaggaattgaacggacttccagacggatctttgccgacgcgttgccagatttcctcttcggagtaatgacgcatggcgacaacgagactcagcactttggaaatagactgaatggaaaaacgttcttgcgcgtctccggcctgaaaaagctgtccgtcaacggtacagatagcaatccccaatcgggaaccgtctactgtagccagcgccggaatataatccgcgactttaccctgaccaatgagcggccgcacttgccgcaagatgttttctaaaattgcattatccatggcgactgccactttctactcctggaccgcaggtctgaaaagacctgcgagtatatcagagctgaatatgtcgcgtcagatccggtctttccacaccgtctggatattacagaattcgtgtaagccgaaatgggaaagctcacgaccaaagccactctttttcacgccaccaaaggccactcgcgcgtcgctggcacaataaccattgataaacaccccaccgcattccagacgtgccgccatctgtctggcctgtgtttcgtcagtggtaaaaatggtcgcactaaggccgaactcactatcattagccagttccagtgcatgttctgcatctttcgcaatggtgattgccgcaacggggccaaacatttcttcccgaaacgcggtcatttctggggtaacattcgccagaaccgttggcggatagtagttacctgccccagccatcttttccccgcccagtaacaaacgcgcaccctgcgccagggttttctccacctgatgatgcagctcatcacgtaaatcaaaacgagccattggtccgagagcgttctcttcgtcacggggatcgcccattttcaaggctgccgcagctgccacaaaacgttcggtaaatgcgctagcaattccctcttcgataataaagcgttttgccgctgcacatacctgtccggtattctgataacgtccggctaccgccgctttcaccgccagttccagatcggcatcgttaagcacaataaacggatcgctaccgcccagttccagtacgcattttttcagtgccgctccagcctgtgcgccaatagccgctcccgcacgaacacttccggtcaccgtgacagcagcaatgcggctgtctttaatcatctgactgacaccgtcgttgtcggcattcagccagccatatacgccttgtgggatacccgcatctttaaacacctgggcaatgagctgtgcacagcccatcacattcggcgcatgtttaagtaagtagccgttacctgcaagaatgatgggaacagcgccacgcatcacctgccataacggaaaattccacggcataatcgccagaatcgtccccaacggtcgatactcaataaccgcctgctgattttccaccagcgtaggttccgccttcagcattgccggaccatgttctgcataccagtcacacaaattcgcgcttttcgccacttcagcgcgcgcctggttgattggtttgcccatttcgcgggtgatcatttgcgccatttcttcgctacgagcgcgcagagccttaccgatatcacgcagtttttcagcacgataatctatatttgtctcgcgccagtcgcgaaagcctgctgccgccagctgaagtgcgttttcgatatcgtcagcgccagcccacggcagcacagaaagttgttcacccgtggcaggatttatgctaattgcatgagttgccggagtaatggtcatcggggtatctcctttatgagtcatggtatgaagatacgcagatttactcttgctttaaaatgaataatattaagccacttattcacgaatcgagaatgctatggatctgacccaactggagatgttcaacgcggttgccgaagctggcagcataacccaggctgcagcaaaagtgcatcgcgtgccgagcaatctcactacccgtctgcgccagctggaaacagaactgggggttgatctgtttattcgcgagaatcagcgtttacgtctctctcctgccgggcataactttttacgctatagccaacaaattctcgcgttagtggatgaagcgcggagcgttgtcgctggcgatgagccgcaaggtttattttctcttggtagcctggaaagcaccgctgcagtgcgcattccagccacgctggcggaattcaaccgtcgttatcccaaaattcagtttagtctttccaccggcccttccggcactatgctggatggtgtactggagggaaaactgaatgcggcgtttattgatggacccattaaccatactgccatcgacgggataccggtataccgcgaggaactgatgatcgtcacgccacaaggatatgcgccagtaacccgtgccagtcaggttaatggcagtaacatttatgccttccgcgccaattgtagctatcgtcgccacttcgagagctggtttcatgctgacggtgccgctccgggaactatccatgagatggagtcttatcacggaatgttggcctgtgtgatcgcaggagcaggcattgcgcttattccgcgctctatgctggaaagtatgccggggcatcaccaggttgaagcgtggccgttagctgagcaatggcgttggttaacaacctggctggtctggcgtcgtggtgcgaaaacacgtccgctcgaggcatttattcaactgctggatgtgcctgacagcgcaagacagggatatcaatgagctatttttgatagttcttgcggttaatatgctctatatagtgatgttccgatgacttatgactatatggggcaaatatggttacgccagtaagcatcagcaattacatatctcttcctgatgattttcccgtacgtaatattgcaccgcaggtaaaagaagttttaaaggattttattgatgcacttagtacaataatatgtaatgaagagtggcgcacgtctttaaacatcaacagtgccacaaaaaagatatttaataaccttgacaacttaagttatattcagaggacttcttttcggggtaacgacacgctatacaatgaaaaggttcagtttaaactcacttatcccgccaggaatggaagacacaaagaaaatattgaatttcaggtagtaataaatttaagccctatttatttagataattttcgccatgatggagaaattaatattttttgcgctcccaacccaaagcctgtcactatggggcgcgtatttcagaccggcgtcgagcgtgtactctttctgtttctgaatgattttattgaacaatttccaatgatcaaccctggtgttcccatcaaaagagcgcatacaccacatattgaacccctgcctagcgatcaccataccgctgcagattacttacgccagtttgatttgcttgtcctgaattttatctctcgcggtaattttgtcatactcccccgattatggaataactctgaggttcacagatggttcgtcaataaagatcctaacttgatcaccgccattctcgacataacggacagcgaattaaaagaggatttgttgcaaagcctgatggatagtttaggttctaacaaacatgtactacccgaagtctgcatctgctttttatcccttttagcagaacaagaatctcctcattttcagaacttgtttttatttttcgccaatatgttattgcactatcaccaatttatgaatcccaatgaaagtgatttgaatgacgtgttgatgccagcaagtttaagtgatgataaaattatcaaacatatggcgcgcaggaccctcaaactgtttgtaaaaaatgaaacaccgccaaaagttactcacgaagacctggtgaaaaacaggcctcgctcccctgtcagaccacctatacccgcaaccgccaaaacgccagacctccctgaacgtcattaaaccgtgatgttaccgactctctgacgcgtgaaagaatcagcgtcagagaaacggaaaacgcgatccagatcacaaatgcattgtattcacatcattaaccgttttaagatcatttcatcactttttcgcaactcacccgataatctgttatgacaacaaacactgtttcccgcaaagtggcgtggctacgggtcgttacgctggcagtcgccgccttcatcttcaacaccaccgaatttgtccctgttggcctgctctctgacattgcgcaaagttttcacatgcaaaccgctcaggtcggcatcatgttgaccatttacgcatgggtagtagcgctaatgagtttgccttttatgttaatgaccagtcaggttgaacggcgcaaattactgatctgcctgtttgtggtgtttattgccagccacgtactgagctttttgagctggagctttaccgttctggtgatcagtcgcattggtgtggcttttgcacatgcgattttctggagcattacggcgtctctggcgatccgtatggctccggccgggaagcgagcacaggcattgagtttaattgccaccggtacagcactggcgatggtcttaggtttacctctcgggcgcattgtgggccagtatttcggttggcgaatgaccttcttcgcgattggtattggggcgcttatcacccttttgtgcctgattaagttacttcccttactgcccagtgagcattccggtagtctgaaaagcctcccgctattgttccgccgcccggcattgatgagcatttatttgttaactgtggtggttgtcaccgcccattacacggcatacagctatatcgagccttttgtacaaaacattgcgggattcagcgccaactttgccacggcattactgttattactcggtggtgcgggcattattggcagcgtgattttcggtaaactgggtaatcagtatgcgtctgcgttggtgagtacggcgattgcgctgttgctggtgtgcctggcattgctgttacctgcggcgaacagtgaaatacacctcggggtgctgagtattttctgggggatcgcgatgatgatcatcgggcttggtatgcaggttaaagtgctggcgctggcaccagatgctaccgacgtcgcgatggcgctattctccggcatatttaatattggaatcggggcgggtgcgttggtaggtaatcaggtgagtttgcactggagtatgagcatgattggttatgtgggcgcggtgcctgcttttgccgcgttaatttggagtatcattatatttcgccgctggccagtgacactcgaagaacagacgcaataattgaaaggcccattcgggccttttttaatggtacgttttaatgatttccaggatgccgttaataataaactgcacacccatacataccagcaggaatcccatcagacgggagatcgcttcaatgccacccttgcccaccagccgcataattgcgccggagctgcgtaggcttccccacaaaataaccgccaccaggaaaaagatcagcggcggcgcaaccatcagtacccaatcagcgaaggtactactctgacgcactgtggacgcgctgctaataatcatcgctatggttcccggaccggcagtacttggcattgccagcggcacaaaggcaatattggcactgggttcatcttccagctcttcgctcttgcttttcgcctccggactatcaatcgctttctgttgcggaaagagcatccgaaaaccgataaacgcgacgattaagccgcctgcaattcgcagaccgggaatgctaatgccaaatgtatccatcaccagttgcccggcgtaatacgccaccatcatgatggcaaatacgtacacgctggccatcaagctctgacgattacgttcggcactgttcatgttgcctgccaggccaagaaataacgcgacagttgttaatgggttagctaacggcagcaacaccaccagccccaggccaattgctttaaacaaatctaacattggtggttgttatcctgtgtatctgggttatcagcgaaaagtataaggggtaaacaaggataaagtgtcactctttagctagccttgcatcgcattgaacaaaacttgaaccgatttagcaaaacgtggcatcggtcaattcattcatttgacttatacttgcctgggcaatattatcccctgcaactaattacttgccagggcaactaatgtgaaaagtaccagcgatctgttcaatgaaattattccattgggtcgcttaatccatatggttaatcagaagaaagatcgcctgcttaacgagtatctgtctccgctggatattaccgcggcacagtttaaggtgctctgctctatccgctgcgcggcgtgtattactccggttgaactgaaaaaggtattgagcgtcgacctgggagcactgacccgtatgctggatcgcctggtctgtaaaggctgggtggaaaggttgccgaacccgaatgacaagcgcggcgtactggtaaaacttaccaccggcggcgcggcaatatgtgaacaatgccatcaattagttggccaggacctgcaccaagaattaacaaaaaacctgacggcggacgaagtggcaacacttgagtatttgcttaagaaagtcctgccgtaaacaaaaaagaggtatgacgatgtccagacgcaatactgacgctattaccattcatagcattttggactggatcgaggacaacctggaaagcccactgagtctggagaaagtgagtgagcgtagcggttactccaaatggcacctgcaacggatgtttaaaaaagaaaccggtcatagtttaggccaatacatccgcagccgtaagatgacggaaatcgcgcaaaagctgaaggaaagtaacgagccgatactctatctggcagaacgatatggcttcgagagccaacaaactctgacccgaaccttcaaaaattactttgatgttccgccgcataaataccggatgaccaatatgcagggcgaaagccgctttttacatccattaaatcattacaacagctaattgaaaacgtgacaacgtcactgaggcaatcatgaaaccacttagttccgcaatagcagctgcgcttattctcttttccgcgcagggcgttgcggaacaaaccacgcagccagttgttacttcttgtgccaatgtcgtggttgttcccccaagccaggaacacccaccgtttgatttaaatcacatgggtactggcagtgataagagcgatgcgctcggcgtgccctattataatcaacacgctatgtaatttgttctggccccgacatctcggggcttattaacttcccacctttaccgctttacgccaccgcaagccaaatacattgatatacagcccggtcataatgagcaccgcacctaaaaattgcagacccgttaagcgttcatccaacaatagtgccgcacttgccagtcctactacgggcaccagtaagcttaacggtgcaacccgccaggtttcatagcgtcccagtaacgtcccccagatcccataaccaacaattgtcgccacaaacgccagatacatcagagacaagatggtggtcatatcgatagtaaccagactgtgaatcatggttgcggaaccatcgagaatcaggctggcaacaaagaagggaatgattgggattaaagcgctccagattaccaggctcatcaccgccggacgcgtactgtggctcatgatctttttattgaagatgttgccacacgcccaactaaatgctgccgccagggtcaacataaagccgagcatcgccacatgctgaccgttcagactatcttcgattaacaccagtacgccaaaaatcgctaaggcgatccccgccaattgtttgccatgcagtcgctccccgaaagtaaacgcgccaagcatgatagtaaaaaacgcctgtgcctgtaacaccaggctagccagtccagcaggcataccgaagttaatggcacaaaaaagaaaagcaaactgcgcaaaactgatggttaatccataccccagcagcaaattcagtggtactttcggtcgtgcgacaaaaaagatagccggaaaagcgaccagcataaagcgcaaaccggccagcatcagcggtggcatgttatgaagccccactttgatgaccacaaaatttagcccccatacgaccactaccagtagcgccaacaccccatcttttcggctcattctaccgcctctgaatttcatcttttgtaagcaatcaacttagctgaatttacttttctttaacagttgattcgttagtcgccggttacgacggcattaatgcgcaaataagtcgctatacttcggatttttgccatgctatttctttacatctctaaaacaaaacataacgaaacgcactgccggacagacaaatgaacttatccctacgacgctctaccagcgcccttcttgccagcagcttgttattaaccatcggacgcggcgctacgctgccatttatgaccatttacttgagtcgccagtacagcctgagtgtcgatctaatcggttatgcgatgacaattgcgctcactattggcgtcgtttttagcctcggttttggtatcctggcggataagttcgacaagaaacgctatatgttactggcaattaccgccttcgccagcggttttattgccattactttagtgaataacgtgacgctggttgtgctcttttttgccctcattaactgcgcctattctgtttttgctaccgtgctgaaagcctggtttgccgacaatcttagctccaccagcaaaacgaaaatcttcagtatcaactacaccatgctaaacattggctggaccatcggtccgccgctcggcacgctgttggtaatgcagagcatcaatctgcccttctggctggcagctatctgttccgcgtttcccatgcttttcattcaaatttgggtaaagcgcagcgagaaaatcatcgccacggaaacaggcagtgtctggagcccgaaagttttattacaagataaagcactgttgtggtttacctgctctggttttctggcttcttttgtaagcggcgcatttgctagttgcattagtcaatatgtgatggtgattgctgatggggattttgccgaaaaggtggtcgcggttgttcttccggtgaatgctgccatggtggttacgttgcaatattccgtgggccgccgacttaacccggctaacatccgcgcgctgatgacagcaggcaccctctgtttcgtcatcggtctggtcggttttattttttccggcaacagcctgctattgtggggtatgagtgctgcggtatttactgtcggtgaaatcatttatgcgccgggcgagtatatgttgattgaccatattgcgccgccagaaatgaaagccagctatttttccgcccagtctttaggctggcttggtgccgcgattaacccattagtgagtggcgtagtgctaaccagcctgccgccttccagcctgtttgtcatcttagcgttggtgatcattgctgcgtgggtgctgatgttaaaagggattcgagcaagaccgtgggggcagcccgcgctttgttgatttaagtcgaacacaataaagatttaattcagccttcgtttaggttacctctgctaatatctttctcattgagatgaaaattaaggtaagcgaggaaacacaccacaccataaacggaggcaaataatgctgggtaatatgaatgtttttatggccgtactgggaataattttattttctggttttctggccgcgtatttcagccacaaatgggatgactaatgaacggagataatccctcacctaaccggccccttgttacagttgtgtacaaggggcctgatttttatgacggcgaaaaaaaaccgccagtaaaccggcggtgaatgcttgcatggatagatttgtgttttgcttttacgctaacaggcattttcctgcactgataacgaatcgttgacacagtagcatcagttttctcaatgaatgttaaacggagcttaaactcggttaatcacattttgttcgtcaataaacatgcagcgatttcttccggtttgcttaccctcatacattgcccggtccgctcttccaatgaccacatccagaggctcttcaggaaatgcgcgactcacacctgctgtcacggtaatgttgatatgcccttcagaatgtgtgatggcatggttatcgactaactggcaaattctgacacctgcacgacatgcttcttcatcattagccgctttgacaataatgataaattcttcgcccccgtagcgataaaccgtttcgtaatcacgcgtccaactggctaagtaagttgccagggtgcgtaatactacatcgccgattaaatgcccgtaggtatcattaaccaatttaaatcggtcaatatccaacaacattaaataaagattcagaggctcagcgttgcgtaactgatgatcaaaggattcatcaagaacccgacgacccggcaatcccgtcaaaacatccatattgctacggatcgtcagcaaataaattttgtaatcggttaatgccgcagtaaaagaaagcaacccctcctgaaaggcgtcgaaatgcgcgtcctgccagtgattttcaacaatagccagcattaattcccgaccacagttatgcatatgttgatgggcagaatccattagccgaacgtaaggtaattcatcgttatcgagtggccccagatgatcaatccaccgaccaaactggcacagtccataagaatggttatccgttatttctggcttactggcatctctcgcgaccacgctgtgaaacatactcaccagccactggtagtgggcatcgatagccttattgagatttaacaagatggcatcaatttccgttgtcttcttgatcattgccactcctttttcacagttccttgtgcgcgctattctaacgagagaaaagcaaaattacgtcaatattttcatagaaatccgaagttatgagtcatctctgagataacattgtgatttaaaacaaaatcagcggataaaaaagtgtttaattctgtaaattacctctgcattatcgtaaataaaaggatgacaaatagcataacccaataccctaatggcccagtagttcaggccatcaggctaatttatttttatttctgcaaatgagtgacccgaacgacggccggcgcgcttttcttatccagactgccactaatgttgatcatctggtccggctgaacttctcgtccatcaaagacggccgcaggaataacgacattaatttcaccgctcttatcgcgaaaaacgtaacggtcctctcctttgtgagaaatcaaattaccgcgtagactaacgctagcgccatcgtgcatggtttttgcgaaatcaacggtcattttttttgcatcatcggttccgcgatagccatcttctattgcatgaggcggcggtggcgctgcatcctgttttaaaccgccctggtcatctgccaacgcataaggcatgacaagaaaacttgctaatacaatggcctgaaatttcatactaactccttaattgcgtttggtttgacttattaagtctggttgctatttttataattgccaaataagaatattgccaattgttataaggcatttaaaatcagccaactagctgtcaaatatacagagaatttaactcactaaagttaagaagattgaaaagtcttaaacatattttcagaataatcggatttatatgtttgaaaattattatattggacgagcatacagaaaaagcaaatcacctttacatataaaagcgtggacaaaaaacagtgaacattaatagagataaaattgtacaacttgtagataccgatactattgaaaacctgacatccgcgttgagtcaaagacttatcgcggatcaattacgcttaactaccgccgaaagttgcaccggcggtaagttggctagcgccctgtgtgcagctgaagatacacccaaattttacggtgcaggctttgttactttcaccgatcaggcaaagatgaaaatcctcagcgtaagccagcaatctcttgaacgatattctgcggtgagtgagaaagtggcagcagaaatggcaaccggtgccatagagcgtgcggatgctgatgtcagtattgccattaccggctacggcggaccggagggcggtgaagatggtacgccagcgggtaccgtctggtttgcgtggcatattaaaggccagaactacactgcggttatgcattttgctggcgactgcgaaacggtattagctttagcggtgaggtttgccctcgcccagctgctgcaattactgctataaccaggctggcctggcgatatctcaggccagccattggtggtgtttatatgttcaagccacgatgttgcagcatcggcataatcttaggtgccttaccgcgccattgtcgatacaggcgttccagatcttcgctgttacctctggaaaggatcgcctcgcgaaaacgcagcccattttcacgcgttaatccgccctgctcaacaaaccactgataaccatcatcggccaacatttgcgtccacagataagcgtaataacctgcagcatatccgccaccaaaaatatgggcgaaataactgctgcgatagcgtggcggtatagcaggaagatccatattttccgccaccagcgcccgcaattcaaaatcatcgacatcctgcattgcttcgttttcttccaggcaatgccagcgcatatcgagaagtgcggcgctaagcagttcgctcatctcataccctttgttgaacaggctggcattacgcattttctgttgcagttcgtcaggcattgctgccccgctctgataatgccgggcgtagcgagcgaatacctgcggatgcgttgcccagtgttcgttgatttggctcggaaattcgacaaaatcacgcggcgtgttggtgccggaaagcgtggcataacgctggcgggcaaaaaggccgtgcagcgtatgaccaaattcatggaataaggttatgacatcatcccagagtaacaacgcaggctcaccggcagcgggtttctgataattgcagacgttataaattaccggatgtgttttattaagcgtactttgctcaacaaaattgcccatccatgcaccgccgcttttactatcacgggcgaagaaatcaccgtaaaataacgccagccccacgccattatgatcaaaaatttcccacacacgaacgtcaggatggtagacaggaatatcaaaacgttcgacaaacttaataccgaagagctgattcgcggtccagaatacaccttcatttaacaccgtgtttaattcaaaatatggcttgagctgcgcctcatcaagatcaaatttctcccgccgtacctgttccgcataaaatgcccagtcccacggctgcgcgctaaacccgccctgctgcttatcgataaccgcctgtatggaggctaattcatcgctcgcacgttgacgcgccgctggaacaatttcccgcataaagttaagtgctgcttcaggtgtttttgccatctgatcggcgattttccatgcggcataatgaggaaaaccaagtagtgttgcctgttgtgcacggatctccaccagacgttgaatgatagcgcgggtatcattggcatcatttttttccgctcgcgtccagcccgcaataaacagtttttcacgcgtcgcacgatcgcgcatttcggcaagcgccggttgttgggtggtattcagcagcggaatcagccatttgttatccagacctttctcgcgagccgcctctgccgccagcgcaatctcttgctcactcattcctgccagctgcgcgatatcgttcacaaccagaccgccggatttatttgctgccagtaatcgctggttaaactggctggtcagggtcgcagcttctgtattcagtacttttaattttgctttatcagcttgcgcaagtttggctccggcaaggacaaaacgttgatgaatcacctccaccaggcggatggattcactatcaagccccagggattcacggcgctgccagacagcatctacccgcgcgaataattcaccgttcagatagatatcattagccagttccgccagttcagcggaaaactgctcgtcaagacgctgtaattcatcattggtatgcgccgcagtcatcgcaaaaaagacgctggtaacgcgggtaagtaattctccgctttgttccagtgccagaatagtattgttgaaatcaggcatttgcgggttaagcgcgatggcagcaatttctgcccgcttttgctgcattccctcatcgaatgccgggcgatagtgatgattggcaatttgatcaaaatggggagccagatacggcagtgtgctttgcacaaggaaaggattcattgttgtcattttcttctcctgaacgcgaggtgttccatagcgtaggcttactgataacggagtgcaatcttgcaatccagtattacccgctcttaagcatcccgtgctatgttattgacacacaaaagcgttgaggaacagtgagaagcgcagtgcccagccatcccgatactgctgctttcaccaaatccttagtgcttctttcgtgtttttctattgtcataatggttatctctaaaaaagaggtaagatgcgtactacttactcgccgttattggtattattcagaaaaagtgagtaagactttgcagcaatgtttttgatcctgttcaaataaactaatggcatcagcaacatgctggaaatcaaacgtatgggtaattaatttttctggtttaattaaccctttacttaaccagtcgataacgatcgggaatttatttgcatttaagcgactagagaaaatagagagttcttttccggtaattccttgctgaatcacttcagacggttcactggagaaccccatcaatacaatacgtgccgctggagaagccagcgttacggcctctttcaggatagaaggatgacaagccgcatcgataattaatgtcggcttgatgcctttttcagtgaaaatctcgccaagcggtgtctggctgttattaatcgcccagtcagccccgctctctttcgctttttccagtcgttcatcaatgcgatcggcaacaatcacatttttaacgttatagacgccttttaatacctgaacgatcgtcaggccgattggaccggcaccataaaccagaacggtatcattttcagtcggttgaccatgtccggttacgttagccgcaatggtaaaaggttcgatcattaccgcatattgatcggccactgcttcaggaattttccacgcattttttgccggaaccacggcatattcactgaaaccaccgtcagcgtgcacacctaatacagccagtgtcgtacaaacgttcggtttacctatagagcacggatagcaatgcccacagctgaccaccggatcgacagcaacacgttcaccgactctggcgctttccacgccttcacccactgcatcaatgacgccaaagaattcatgaccaatgacgcgcggatatttcgcaaaaggattatgcccacgataaatatggctatcactaccacaaattccggcaagtttcacttttactcgtacttcacccgcactcggggtgggtatttcacgttcgacaatcgccagttgattcggtttttcaattaatatgcttttcattatcttactccttaccagttccacagcgtgccatcttccagacgtgcgactggtagataagcaggttcatagggatatttcgccgccagcttttcatcgaattcgataccaagacccggtttgtctcccggatgcatatagccgttatcgaaagtccagttgtgcgggaagacttcgagcatttgttcggaataacccatgtattcctggacaccgaaattggggacccacagatcaaagtgcagcgccgcagccatgcagactggactcaaatcggaaggaccgtgactgccagtacgtacctgatacaggctagcaaaatcggcaatccggcgcataccggtaattccgcctgcatgggtcagcgtggtgcggatataatcgatgagttgctcttcaatcagttgtttgcagtcccagatgctgttgaagacttcacccactgcgatgggtgtgacggtatgttggcgaatgagacggaagcattcctggttttccgcaggcgtcgggtcttccatccagaacatgcgataatcttcaatgcttttaccaaagcgcgccgcttcaataggcgttaagcgatggtgcatgtcatgcagcaaatgttcattaaaaccaaacttgttacgtaccgcgtcaaacaatttcggcatgaaatcgaggtatttctccgtgctccacagctgctcttccggccactgtcctttggttgcgggttcataagccagacctttacctttgctcatgccgtaggtggttttcataccagggattccgcactgcacgcggatggctttgaatccaagctcttgatgacgggcataatcatccagagcttcatcaatactgtgaccggtggtatggcaataaaccatcaccccttcacgagacgcgccgccgagtaactggtaaagcggcatgttggcagctttggctttaatatcccacagcgccatatcaaccgcactaatggcgctcatcgtaaccggaccgcgacgccagtaagcacctttatagaaaaactgccagatatcttcgatacggtgcgcatcgcgaccaataagctgcggacaaaggtgatcctgcaaataagaggccacggaaagctcacgtccattgagggtggcatccccaaggcccgtaataccgtcctcagtggtgatttttaatgtgacgaaattacgccccggacaggtaacaaaaacttcagcctttacgatcttcatgttcgattccttgcatcgcttgtcgtgatgcatgaaatctacgcaactgagctactaccatacaagtataaagatcgaaaaaagccggagtgatcacaaaaaaaggcgtatatttgcgctgtgaatggttgacaaaagatgaaatagaataccttttgtcagctgacacttcctcttatcttattgataaaatggatttatgttcttacgtgcgcccccagcccgcaacaatgatcaacatgccgcaaagcgcaatcaacgcacccgtccagtcataaagagtcagtttcacgccatccacaacgcgcagccacatcaacgccgtgcagacataaacgccaccataagccgcgtaaacacgcccactcgccgctggatgcaacgttaacaaccagacaaacagcgccagactaatccccgccggaagcaacagccagatactggcgtttcgttttaaccacaaccagggcagaaagcatccaataatttcacacagcgcagtagcaaaaaatagtaacgttgttttaatcatctttgtctcttattgacatcatgtatagttatagggcgacataatatcatcaatataaacaccctcctggtacgttttgcgtccgcagtggatggtgtagaatcacctttaatcattcatacagggaatgaattatgaaaatcactctcagcaaacgaatcggcctgctcgctattctgctgccttgcgcactggcattgagcacaactgttcatgccgaaactaacaaactggtgattgagtctggcgacagtgcacaaagccgccagcacgccgctatggaaaaagagcaatggaatgacacgcgcaatctgcgccagaaagtgaataaacgcactgaaaaagagtgggataaagccgacgccgcttttgataaccgcgataaatgtgagcaaagcgccaacatcaatgcctactgggagcccaatactttgcgctgcctggaccgtcgaactggccgcgttattaccccctaacctgttattgatttaaggaatgtaaggacacgttatgccaagcgcccacagtgttaagctacgcccgctggagcgtgaagatttacgctatgtacatcaactcgacaataacgccagtgtgatgcgttactggtttgaggaaccctacgaagcctttgttgaactctctgatctgtatgataagcatattcacgatcagagcgaacggcgctttgtggtggaatgtgacggcgaaaaagccggtctggtggagctggtggaaattaaccatgttcatcgccgcgcagaatttcagataattatctccccggagtatcaggggaaaggtctggcaacccgtgccgccaaattagcaatggactatggctttaccgttctcaatctctataagctgtatctgatcgttgataaagagaatgaaaaagcgattcacatttaccgcaagcttggctttagcgttgaaggtgaattgatgcacgagttctttattaatggtcaatatcgtaatgccattcgcatgtgtatattccagcatcagtatctggcagagcacaaaacaccgggtcagactctcctgaagccgaccgcacaataacattaataataatcgatcgtatttttgatggtgtaaacccgttcgacggcgggttttactccttcatcaacaatgattagctgacagtccaccggattagcgtgactgtcatattcacagctctgttttacattaccaacccgttgattattcagtaaagtaaccgctgtgtaatctaattttttgatcggatccgtacttggcgtggcgctgacagataatgttttgtcgttacttttcgtggttttacccagcggataaccctgatcatcatagcgatattccatctgcatttgtttgctgctggctttaatcacgaagccattatcatcggtttcccaactcaccccggcagaaggtaattctgctagctggcattttccctgtaaacgtactctcttctccagcgtctcggcatcacggtaataattggcgtccagtaccagagcgaccacggtattattttccagatccagtaattcgagactatcaaaacagccttcttcgctcaaagtcccagaaacacgtttcgtcacttcaccttgctcatccattaatgtctgagtgaaatcttttaccggaccacgcagcggatcaaaatcgaattcattagagaaactggccatctcaggggtaaaactaagtgttacctctgtgcggtcacatcctgtgaggaatatcgcgagtaagcatggtagtaatttgtatttcacaacagtcaccagagagtagagatgattctcaatcatagtagcaaatacagtactttacacgttaaatgctatgcttaaagaagttatcttcgcgtaaggagcttatgatgaaactcagtacctgctgtgccgcgcttctgctcgccctcgccagtcccgcggtactcgccgcgccgggatcctgtgagcgcatacagagcgatataagtcagcgcattatcaataatggcgtacccgaaagcagcttcacgttaagtattgtacccaatgaccaggttgatcagcctgattcccaggtcgtcggccattgcgctaatgatacgcataaaattctctatacccgcaccaccagcggtaacgtctctgctcccgcgcagtctagccaggatggcgcgcctgccgaaccgcagtaacacattatcgactgaacgccggatatgacaaatccggcgatttgaacatacaacataatcccaccttattactcatacccttctattgatatggattaataattcttaacccaaaatgggtagactccctctattgttagcgcgctaaatattcaatatataaacttttatataacgataaagaacagggagtgagttatgtccaaaaatgaacgaatggtgggcatcagccgcagaacactcgttaaatctaccgcgataggttctctggcgctggctgcaggcggtttttctttgccgtttaccctgcgcaatgcagcagcagcggtacaacaggcccgcgaaaaagtggtctggggtgcctgttccgtcaactgtggtagccgctgtgcacttcgtctacatgttaaagataatgaagtgacctgggtggaaactgacaataccggcagcgatgagtacggcaaccatcaggtacgcgcctgtttgcgcggtcgctccatccgccggcgtattaatcatcccgatcgcttgaattacccaatgaaacgcgtgggcaaacgcggcgaaggcaaattcgaacggattagctgggatgaagccctggatactatcgccagtagcctgaagaaaaccgtcgaacaatatggcaatgaggctgtatatattcagtactctagcgggatcgttggcggcaatatgacccgctctagcccaagtgccagcgcggtcaaacgcctgatgaactgctacggcggtagtctcaaccagtatggctcctacagcactgcgcaaatttcctgtgccatgccctacacctacggcagtaatgatggcaacagcaccacggatattgaaaacagcaagctggtcgtgatgtttggtaacaacccggcagaaacccgcatgagcggtggtggcatcacttatcttcttgaaaaagcgcgcgagaaaagcaacgccaaaatgattgttatcgatccgcgatataccgatacggctgccggtcgtgaagacgaatggctccctattcgcccgggcaccgatgccgcgctggttgcgggtattgcctgggtattgattaacgaaaatctcgttgatcaaccttttctcgataaatactgcgtcggctatgacgaaaaaaccttacccgcagatgcacccaaaaatggtcactataaagcctatattcttggtgaaggtgacgataaaacagcgaaaacgccgcagtgggctagccaaattaccggtatcccggaggaccgtatcatcaaactggcgcgtgaaattggcacagcaaaacccgcttatatctgccagggctgggggccacaacgccaggcaaacggcgaactgactgcacgcgctattgctatgttacctattttgacgggcaatgtcggcatcagcggcggaaatagtggcgcgcgtgaaagcacctataccattaccatagaacgcctgccggtgctggataatccggtcaaaacgagtatctcctgcttcagctggacagatgctatcgatcatggtccgcaaatgacggcaatccgcgacggcgtccgcggcaaagataaactggatgtgcccattaagttcatctggaactacgcgggaaataccctcgttaatcagcattctgacatcaacaaaacgcatgaaattctgcaggacgaaagcaaatgcgaaatgattgtggtcatcgaaaactttatgaccagtagcgcaaaatatgccgacattctgctgccagacctgatgaccgttgagcaggaagatattattcctaacgactacgccggtaacatgggatatctcattttcctccagcctgtcaccagcgaaaaattcgaacgcaaaccgatttactggatcctgagtgaagtcgcgaaacgtcttggacctgacgtctatcaaaagttcacagaaggtcgcacgcaggaacaatggttacaacatctgtacgccaaaatgcttgccaaagatccggcgttaccgtcttacgacgaactgaaaaaaatgggtatctataagcgtaaagatcccaatggccattttgtcgcctacaaagcatttcgtgacgaccccgaggcaaatccacttaaaacgccttccggtaagattgaaatttattccagcaggctggcggaaattgcccgtacctgggaactggaaaaagatgaagtgataagcccattgccagtttatgccagtacctttgaaggctggaactcccctgaacgtagaaccttcccactgcaactgtttggtttccattacaaatcccgtactcacagcacctacggcaatattgatctcctgaaggctgcctgccgtcaggaggtgtggatcaaccctatagatgcgcagaaacgtgggattgccaacggcgatatggtgcgggtgtttaaccatcgtggcgaagttcggctaccagccaaagtaacaccacgtattctccctggagttagcgctatgggccagggagcctggcacgaggccaatatgtctggcgataaaatcgaccatggcggctgtgtgaatacgctaaccactctgcgccctagtccactggcgaagggaaacccgcagcacactaatctggtcgagatcgaaaaaatataacccacgacaaccataaattctggcatgacattttgtttgaaaagcaataagtgagtaatgatgaaaatccataccacagaggcgctcatgaaggctgaaatcagccgtagaagtctgatgaaaacctccgcacttggcagtcttgcgctggcaagcagtgctttcactctgccattttcccaaatggtccgggcggcagaggctccggtagaagagaaagcggtctggagttcctgcaccgttaactgcgggagccgctgtctgttacgtttgcatgtgaaagatgacaccgtgtactgggtggagtctgatacgacaggtgacgacgtctacggtaatcatcaggttcgagcgtgtttacgcgggcgctctatccgccgacggatgaatcatcctgataggttgaaatatcccatgaagcgcgtcggcaagcgcggtgaaggtaaatttgaacggataagttgggacgaagccctggataccatcagtgataatcttcggcggatcctgaaagattacggcaatgaggctgtacatgtcctgtacggaacaggcgtagatggcggaaacatcaccaacagtaacgtcccgtaccgtctgatgaactcttgcggtggttttctcagtcgctatggcagctacagtaccgcacagatcagtgccgcaatgagttatatgttcggtgccaatgatggcaacagcccggatgatatcgccaatacgaaactggtcgttatgttcggaaataacccggcagaaacgcggatgagcggcggtggtgtcacttactacgtcgagcaagcccgcgaacgtagtaacgcacgcatgatcgtcatcgatccacgttataacgacactgctgccgggcgtgaagatgaatggctgcccattcgccctggcaccgatggcgcactggcctgtgcgattgcctgggtactgattactgaaaacatggtcgatcagccatttctcgacaaatattgtgttggttacgatgaaaaaacgctgcccgccaacgcaccacgtaacgcgcattataaagcctatattctgggcgaagggcctgacggcatagctaaaacgccggaatgggcagcaaaaatcaccagcatcccggcagaaaaaattatccagttggcacgagagatcggtagtgcaaaacctgcttatatttgtcagggttgggggccacaacgacattccaacggcgagcaaacatcccgcgctattgccatgctttccgttctcaccggcaacgtcggcataaacggcggcaacagtggcgtacgcgaaggtagctgggatctgggggtagaatggttcccgatgctcgagaatcctgttaaaacgcagatttccgtctttacatggacagatgccatcgaccatggtacggaaatgaccgcgacccgtgatggtgttcgtggaaaagaaaaactggatgtccccatcaagtttttatggtgctacgccagtaacacattgatcaatcaacatggcgacatcaatcacacccatgaggtgcttcaggatgacagcaagtgcgagatgattgttggcattgaccacttcatgacggccagcgctaagtattgcgatatcctgttgcccgacctgatgccaacagagcaagaagaccttatctctcatgaatctgcagggaatatgggctatgtgatcctcgcccaacccgcaaccagtgcaaaatttgaacgcaaacccatctactggatgctgagtgaagtcgccaaacgcttaggaccagacgtttatcaaacctttactgaaggtcgcagtcagcatgaatggatcaaatatctccatgcgaaaacgaaggaacgtaaccctgagatgcccgactacgaggagatgaaaacgaccgggatctttaagaaaaaatgcccggaagaacactacgtcgctttccgcgcattccgtgaagatccacaggcaaacccgttgaaaacacctagcgggaaaatcgaaatttattctgaacgactggcgaagattgcagatacctgggaattgaaaaaagatgaaattattcatccccttcctgcgtataccccaggttttgatggctgggacgatcccctgcggaaaacctatccactgcagttaacgggcttccattacaaagcgcgtacccactccagctacggcaatattgatgtgttacagcaggcctgcccacaagaggtgtggatcaaccccattgatgctcaggcacgcggtatccgtcatggcgataccgtgcgggtatttaacaataatggagaaatgctgattgccgcaaaagtgactccgcgtattctgcctggcgttaccgccatcgggcaaggtgcgtggcttaaagcggatatgtttggtgaccgggtcgatcacggcggcagtatcaatattctgacctctcaccgccctagtccgctggcaaagggaaacccgagccacagcaatcttgtccagatcgaaaaggtttaaggagtagcccatgaccacacaatatggattttttatcgattccagccgctgtactggctgtaaaacctgcgaactggcgtgcaaagattttaaagatcttggcccggaagtcagtttccgccgtatttatgaatacgctggcggcgactggcaggaagataatggcgtctggcaccagaacgtgttcgcttattatctctccatctcctgtaaccattgcgatgaccccgcatgtacaaaagtctgccccagcggcgcaatgcataagcgtgaagatggctttgtggtggttgatgaagatgtttgtatcggctgccgctactgccacatggcttgtccgtacggcgcgccacagtacaatgctgaaaaagggcacatgacgaagtgcgatggttgttatagccgcgtcgccgaggggaaacaacccatatgtgtcgaatcctgcccgctgcgtgcacttgagttcggtccaattgaagagctgcgccagaagcacggcactcttgctgccgtcgcgccactgccgcgcgcgcatttcacaaaacccaatatcgttatcaaacctaacgccaacagccgcccgaccggcgataccactggttatctggctaatccggaggaagtgtaaaatgggaaatggatggcatgagtggccactggttatctttaccgtattgggtcaatgcgtagtaggcgcgctgattgttagcggaattggctggttcgccgccaaaaatgacgcagaccgtcagcgtattgtccgtggcatgtttttcctctggctgttgatgggcgtcgggtttattgcctctgtcatgcacctgggaagcccactgcgggcgtttaactccctgaatcgaatcggagcttctggtctgagtaacgagattgctgccggttccatattttttgccgttggcggattatggtggctggtggcagtcatcggtaaaatgccgcaagcgttggggaaactctggttacttttcagcatggcgctcggcgtcattttcgtctggatgatgacctgcgtgtatcaaatcgacaccgtgccaacctggcataacggttacactacgctggctttcttcctgacggtattgttgagcggtccaatacttgctgccgcaattctgcgggcagctcgcgttacatttaataccacaccatttgccatcattagcgttctggcgctgatcgcttgtgccggggtgattgtgctgcaaggtttgtctctggcgtctattcacagttccgtgcaacaagccagcgcactggtaccagattacgcctccttacaggtctggcgtgtggtattgttatgcgcaggtcttggatgctggctttgcccgctcattcgtcgccgtgaacctcacgttgccggacttattctggggctaatcctcatacttggcggtgagatgatcgggcgtgtgctcttttatggcctgcacatgacagtaggaatggctattgcaggttaacaaattggtgcggggcaacccgcacatttcaggatgttaggaatgacccattttagtcagcaagataatttttctgtcgcggcgcgcgtgttgggcgcgctgttttattacgctccagagagtgcggaagccgcacctctggttgcggtactcaccagtgacggctgggaaactcagtggcctctaccagaagcgagtttagcgccgctggtgacggcttttcagacacagtgtgaagagactcacgcccaggcctggcagcgtttgtttgtcggcccgtgggcactgccgtctccgccgtgggggagcgtctggctggatcgcgaatctgtgctgtttggcgatagtacattggcacttcgtcagtggatgcgcgagaaaggcattcagtttgaaatgaagcaaaacgaaccggaagatcattttggtagtctgctgttgatggctgcgtggttggcggagaatggtcgccagacagaatgcgaagaattgctggcatggcacctttttccgtggagtacacgttttcttgatgtttttatcgaaaaagcagaacaccctttctaccgtgcactgggtgaactggctcgcttaacgctggcgcaatggcaaagtcaactgttaattcctgtcgcggttaaaccgctgtttcgataagatcaccgtaatattgccggatggtgacgattacgcgcaatccggcaataataggttacagtgtcacgtttttttatctcttaaagcacgcactgcttttgcggctggcctcttttgccgcaaaatagtcgcccgtgtttcattgcccatttctgctcatgcatcatctacacatctatccggatctgcgcactatgttccaccgtctgcttatcgcaacagtcgtcggtattctcgcggcctttgccgttgccgggtttcgtcatgcgatgctgctactggagtggttgttcctcaataatgactccggcagtctggtcaatgcagcgacaaacctttccccctggcgacggttgctaactccggcgctcggcggactggcggcgggtttgttgctgatgggctggcagaaatttacccaacaacgccctcatgcgccgaccgattatatggaagcgttgcaaaccgatggacagttcgattacgcagcaagcctggttaaaagccttgcctctctgctggtagtaaccagcggcagtgcaattggtcgcgaaggtgcgatgattcttttagctgcccttgccgcctcctgttttgcccaacgttttacgccacgccaggagtggaaattatggatcgcctgtggggccgcggcgggaatggctgcggcctatcgtgccccgcttgctggcagtttatttatagccgaagtgctgtttggcactatgatgttggcctctctcggcccggtgattatttccgccgtcgtggcattgctggttagcaatctgattaatcatagcgacgcgttactctacaacgtacaactcagtgtgacggttcaggctcgtgactatgcgctgattatcagtacaggtgtgctggcaggtctgtgcggaccactgttgttaacgttaatgaacgcctgtcatcgtggatttgtgagtctcaaacttgcgccgccctggcaactggcactaggcgggttgatcgtgggtctgctttccctgttcacacctgcagtgtggggcaacggctatagcaccgtacaatcctttttaaccgccccaccactgttaatgatcattgccgggatcttcctttgtaaactgtgtgccgtgctggcgagtagcggttccggcgcacccggtggggtctttacaccgacgctatttatcggtcttgccattggcatgttgtatggtcgtagcctgggattatggttccctgatggcgaagaaattacacttttactcggattgaccgggatggcgacactgttggcggcgaccacgcacgcgccgattatgagcacgttgatgatatgtgaaatgaccggggagtatcagctactccccggtttattgattgcctgcgtaattgcgagcgtaattagccggacgttacaccgtgactctatctaccgccagcacactgcgcagcatagctaagcggatgtattgccccagttcacgctgttcggcgcgcggcagataaggcagttcaccaatgagcggtgccggaagttttttacccagcacatcaatgatttccgcataatgcgccagtcctgggttgattcggttagccacccagccaatgagcggcagcccgtcgttggcgatcgcctgagctgttagcagtgcatggttaatgcaaccttcctgaataccgacaaccatcaacaccggcagttgttcctgcactacccattcagagagtggacgcaaatcattcatcagactgcgccagccgccagtcccttctaccacgacatgatcgactttttcggtcaggtttgccaggccgttactaatgagggtgtaattgattgggcaactgtgcgccacgctactttcttcttcgcttaacgcgataggattaactgcttcataaggcagttcgatggtactaacactctgcaacaccagggcatctttattacgcagcccttcgggtgtctctttgctccccttcgctacgggtttatatcccgcaaccgtttttccctgggaggctaacgcttgtagcaatgcgcgggaaaccaccgttttccctacagaagtgtctgtaccggtaataaagaaacgcttcagcatcactaactccaccgttatgcttcacaaatataaaccaggaaaataattaaccttgaaagtctaagttatgctttcctggcccaaattgagatagcgcaaattttggtagaacagttaaaaaatgttaaccctgcaacagacgaatcaacaaagaaccgttatacatcgcgtcttttaccagtgcagcgcctgccatcgtgccctggttagaaaactgagtactctcaacgctgatgtgctgactatacgcaggaagggcctgctgacggatgctgtcactgatgaccgggaagaggatatctgccgctttacttaacggactgccaatcagtattttttgtgggttaaataaattcaccatgatggcaagaatgcgcccgacatgcgcgcccaccccggtaatgatgtcttttgccagtagatcgccgcgcaatgccgcctgacacaaactgtccacggttaacggttgtccatgtaacatgctgctcatggattgattaagacgcagctgtgccagctcaagaatactgtccacgctggcgatggtttcgaggcagccgtgattcccgcaataacagcgtttcccatacgggtcgacctgtgtgtggcctatttccacgagactactgctgcctgcgtgtagcagatgaccatcggtaatgacgcccgcccccacgttgtgatcgataaccacctgaatcacatcgcgcgccccgcgactggcaccaaacaaggcctctgccatcgtccatgcgctgatatcatgctgaatataaaccggaacgccggtatgctgctccagcgcctcgccgagcggcatctcttttacatcctcgtagaacggcatgcgatgtacaataccattttccgtatcaataattcccggcaaggttatggcaatgctagttagacgctcaagttttttctggtggcggataaaaaactgatcgatatgggaaataatacgatccagcaatggcaagtcatcttttaacgccagttcctggctctcttccaccaccagtttgctgctcagatcgcgcagagcaaggaaaatctccccgcgactaatgcgcagagaaagatagtgccaggcttcagtttcaaccaccagccccaccgccggacggccacggttccccgcttctttgatttccagctcttgcaccaggtgtgcttcgagcatctcacggacaattttagtgatactggcaggagccagttgcgccagacgggaaagatcgatacggctgactggaccaagctgatcaatcaggcgataaaccgcgcccgcgttggtctgctttatttgatcaatgtgcccaggctggttttcagcaaccaccgcatactccctatattttcgcgctccgaaataatctgtaggctatggtgaagcacttcaatacgtgtcgtcaaatttttacttaggcatgtgattaacagcacatttttcgggctttttcgctgaaatttccctcacctgagagcattcagcagatgaatacgaaagttacgcgcagccggactttgttcatgatgtttcggccagaccaaccacatttcagaaaccgcatcctcttcagcaatcggcacccagcgcatttcgttgagctgaacacgtttaaaactcgcaggcaaaatactaacacccagaccggcggaaaccagaccgatgatggtcattgcctcgcccacctcctgagtgatgacgggcgtcaaatggtaacgtcgcatcagcccgagaatatcgtcatacagccctgtcccgacgtgcggatcaaaaaagacaaagggttctttcgccagttcagccagcgttacattcgggttatttgccaggggatgatcgtgcgggatcatcgccataagcggttcatggacgatgactgcgtgttcaaggctctccggtaacgctgtgttacgcagcaatcccatatccagcgttccttcaatgagcggagcgatttgctcgcgagtgttcatttcgcgggtttgtaaatggacatcaggataatcacggcgaaacaggcttaacgtatcggacaccgcccgaataaaaggagcgctgctagtaaaaccaatgcgcaactcccccgcttcaccctgatgcagcctttcagcgcgagcggcagcgtcatccaccatagacaggatttgccgactatctgcaagaaactgttttcctgctgccgtcagcaatacactgcgattggttcgtgccagcagtcgggcaccaatttgttgctccagcgcctgaatctgctgacttagcggcggttggctaatattcaggcgggcagcggcgcgcccgaaatgcagctcttccgcaacagcaacaaagtaacgcagatgacgaagttcaatattcatatttaaaacatcttatttgagattattaatatattagacagaacaattcgattttcctaccctatgtataagcctgatctacaggcatatttagcaaggatttcaagtgagccgtactacaactgttgatggcgctccggcaagcgacactgacaagcaaagcatttctcagccaaatcaatttattaaacgcggtacgccgcaatttatgcgcgtcaccctggcgctgttctctgccggactggcaacatttgcacttctctattgtgtgcagcctatccttccggtgcttagccaggagtttggcttaacccccgcgaacagtagtattagtctgtccatttccacggcgatgttggctattggtttgctgtttactggcccgctatccgatgccattggtcgcaaaccagtgatggtcacggcgctactgttggcctccatttgtacgttacttagcacaatgatgaccagctggcacggcattttgattatgcgcgccttgattgggcttagcttaagtggcgtggcagctgttggcatgacttatcttagcgaggaaatccatcccagtttcgtggcctttagtatggggttgtatatcagcggcaacagtattggcggcatgagcggacgcttaattagcggtgtcttcacggactttttcaactggcgaattgctctggcggcaatcggttgtttcgcgctggccagcgcgttgatgttctggaaaatcctccctgaaagtcgccattttcgcccgactagcctgcgccctaagacgttgtttatcaactttcgtctgcactggcgtgaccggggattaccgttattgttcgcagaaggctttttgctgatggggagcttcgtcacgctgtttaattacatcggctatcggttgatgctctccccctggcatgtcagtcaggccgtggttggcttattaagcctggcttatttgaccggtacatggagcagtcccaaagccggaaccatgaccacccgctatgggcgtggtccagtgatgttgtttagcacgggggttatgctgtttggtttactgatgaccttattcagcagcctgtggctgatctttgccggaatgttactcttcagtgcaggattcttcgcagcccacagtgtagccagcagctggatcggcccccgcgcaaaacgcgctaaaggccaggcctccagcctgtatctgttcagttactatctggggagcagtattgccgggacgctgggtggtgttttctggcataactatggctggaacggcgtcggcgcatttattgctctgatgctggtcattgctctgctggtcgggacgcgtttgcatcgtcgtctgcacgcctgaaaaataagtccggactgcggtaaatacccgtccggacttattgccagctcaaaccaacgttaatagccatcctaaaatagacgaagcgccagccaattcccgcagcgcgtctagcgtcatcaggattataagtacccaaataaacggattcattttgctgtgtgtcatttattactgatgcgcagttattctactgctttgtaagtagtaaaatagttaacccgatcaagactactattattggtagctaaatttcccttaagtcacaatacgttattatcaacgctgtaatttattcagcgtttgtacatatcgttacacgctgaaaccaaccactcacggaagtctgccattcccagggatatagttatttcaacggccccgcagtggggttaaatgaaaaaacaaattgagggtatgacaatgaaaaaagtattagctctggttgttgccgctgctatgggtctgtcttctgccgcctttgctgcagagactacgaccacacctgctccgactgcgacgaccaccaaagcagcgccggcgaaaactacacatcataaaaaacagcataaagcagcacctgcccagaaagcgcaggcggctaaaaagcatcataaaaatacgaaagctgaacagaaagcccctgaacaaaaagcgcaggcagcgaagaaacacgccaagaaacacagccatcagcaaccggcaaaacctgctgcacaacccgcagcgtaagttttcaacagtaatgctggcgcgccccctcgcgcctgaaaattacggtgctaagcgggtaacgtttagcaccgcctttagcggagggtagtatggtgggccgttatcgctttgagttcattctgatcatccttattttatgcgcactgattaccgcccgtttttatctttcctgattgtagttatctgattttactcccactttcatcccgtcccgtctatagtatttatgagggtttgcttttaataatcataattacccaccagagtgtgatatgcgtacaaccattgctgtagtgttgggtgcaattagtttgacgtctgcttttgtgtttgcagataaaccagacgttgccagaagcgcaaacgatgaggtcagcaccctgttttttggtcatgatgatcgtgtgccagtgaatgacacgacccaaagtccgtgggatgcggttgggcaactggaaacggccagcggcaatttatgtacggcgacgctgattgcacccaatctggcattaacggcaggacactgtttattgacacctccaaagggtaaagccgataaagcagtggcgctgcgttttgtgagtaataaaggtctttggcgctatgagatccacgacatagaaggccgcgttgatccgacactgggaaagcggttaaaagcagatggggatggttggattgtacctcccgcagccgcgccgtgggacttcggattgattgtgctacgtaatcccccttctggcattacgccgttgccgttatttgagggagataaagccgcgcttaccgccgcattaaaagcggcaggtcgtaaagtgactcaggcaggctaccctgaagatcatctcgatacgttgtacagtcatcaaaactgtgaagtgactggctgggcgcaaacgagcgtgatgagtcatcagtgcgataccttgccgggtgacagcggtagccctctgatgttgcataccgatgacggctggcaattaattggggtgcaaagtagcgctcctgccgcgaaagatcgctggcgcgccgataaccgggccatttctgttaccggttttcgcgacaagctggatcaactgagccaaaaataatgttcaaacgctgcccgacagcgcgggcagcgtcttcatcaggcaagtttcaccatgatcattccagccaacagcaagaccaggccaatccagcctttacgatttaaccgttgaccaaacaagatccaacctgcggctaacgtggcggcaataccaaacccgccccacaatgcataagcgacagacaagtcgatccctttaacggcttgagaaagcgcactaaaggcagccagcaccgccgccagggagagcaagccaaatattttgcgacgaaagccgtcagaaaatttcaaaaagacgttagcaacgatttccagcacgattgccaatgccagccaggcggcgtgaacccattcaaactgcgccatggttcacctccagttcaggtttacgcgctttacgggtaccactttttatcaacacaatcccggcgaccagggtggttaacccggcaattttcatcaggcttaaactttcgtcgaataacaaaacgctaaacaaggtaataaataaaataccgataccttcccacagcgcataagctacgcctaaggcgatttttttaacggcgaaagagagaaatatatagctcagagaaatcatcaccagcattaaaataaagccgccatttccctcactgacgctcgcccatttcatactcagcgtaccggtaatttctgtagcaatagccagacctaataaaatccaataaatatacattgtccttctcctgcaagagaattattttaattttcgcttaattcagcgaaaccaaagtaaagtggtcaagccccgcgcatagcgcaagctttggcagaagaaaggactaaagcgcgttgcgccagtgctgctcacctacgagcaagatagtggatgaggtacgaagatgggtaaatgtagaaaataacgtcctgaacaaattgtccataatattacaattatccgcagtgttgcttctcgtcatcgcggatgataattgtcctcggtagttgaacacgcctgatttgtatcatagcttaagaattaactcaaaatattttcacttctttacctgagcggtttgattttcgttatgatgacggagcgaaaaagacattattattagcaaaggaagaaaaaacggggacaagcatggcaaagccgatcatcacgctcaatggcctaaaaatcgtcattatgttgggaatgctggtcattattctctgcggtatccgttttgccgccgagatcatcgtgccgtttattctcgcattatttattgctgttattcttaacccgctggtgcaacacatggtccgctggcgtgtgccgcgtgtactggcggtgagcattttgatgaccatcatcgtgatggcgatggtgttgctattagcttatctgggttccgcgctcaacgagttgacgcggacgttaccgcaatatcgcaactctattatgacgccgctgcaagcgcttgaaccgttgttgcaacgcgtagggattgacgtcagtgttgaccagctggcgcattatattgatccgaacgcggcgatgacgttgctcaccaacttattgacgcagttatctaatgccatgagtagtatatttttattgctgctgacggtgctgtttatgctgctcgaagtgccacaattgcccggaaaatttcagcaaatgatggcgcgtccggttgaagggatggcggcgattcaacgtgcgattgacagtgtttctcattatctggtgctgaaaacagccatcagcatcatcaccggcctggtcgcctgggcgatgctcgccgcactcgatgttcgcttcgcttttgtctggggattgctggcctttgcgcttaattacatcccgaatattggtagtgtcctcgcggcaatcccccctatcgctcaggtactggtgtttaatggcttctacgaagcgttgctggtgctggcgggatatctgctgattaatctggtcttcggcaatattctggagccgcgtatcatggggcgtgggctggggctttccacattggtggtatttttgagcttgattttttggggatggttgttaggaccggtgggtatgctgctttccgtgccgttgacaattattgtcaaaattgcgcttgaacaaacagcgggaggtcaaagcatcgccgttctgttaagcgatctcaataaagagtgacggcctcagcagaggccgtcagggttacagagctttcaggattgcatccacgctggctttggcgtcaccaaacagcatgtgggtgttttccttgaagaacagcgggttttgcacaccagcatagccagtgttcatgctacgtttaaagacaatcacgttctgcgctttccacacttccagcacaggcataccagcaatcggactcttcggatcatcctgcgccgccgggttaaccgtatcgttagcaccaatcaccagtacggtatcggtatcagcaaagtcatcattgatctcgtccatttccagcacgatgtcatacggtacttttgcttcagccagcaatacgttcatatgtccaggcaaacgccccgcgaccgggtggataccgaaacgcacattaataccacgagcgcgcaatttctcagtaatttcagcgacaggatattgcgcctgcgcgactgccatgccgtaccccggagtaatgatcacactatgggagtttttcagcagttccgctgtctcttctgcggtgatttcgcggtgctcacccacttcctgatcatcgccagtagaagagccgtcggtgccgaaaccacccgcaataacgctgataaaggaacggttcatcgccttacacataatgtaagaaaggatagccccgctagaaccgaccagcgcaccggtcacaatcagcaggtcgttgctgagcataaagcccgcagccgcagccgcccagccggagtagctgttcagcatgctcaccaccactggcatatctgcaccaccgatggaggcgactaaatgccagccgaataccagcgcaattgcggtcattatcagcaatgccagcacttgcaggccgacgctgtccgtgcgaacaaatacaatcagcagcaggaaggaaacgaccagagccgccaggttcattttgtgacggtttggcagcatcaatggtttagagctaatcttgccacacagtttgccgaacgccaccacgctacccgtgaacgttaccgccccgatgaagataccgaggaacacttccgtcaggtgaatattgaccagaatcggtgccattcccgcgtcatgatgcagatagctgttaaagccaaccagcactgccgccagacccacgaagctatgcaggatcgccaccagttctggcatttcggtcatttcaactttcttcgccagacggataccaattgccccaccaatgaccatcgccagcaagatccagccaacattacccgtatccggtccaaaaatggttgcgattaacgcaatcgccatcccggcgataccgaagttgttaccctggcgagacgtttcatgtttgctaagaccggccagactgaagataaacaggatcgcggcaacaatgtatgcagctgtaactaatcctccagacatatgttaccccttaatttttgcggaacattttcagcatgcgctgagtcacggtgaagccaccgaaaatattaatgctggctataagcaccgcgataaaactaaggaagctaacccagccgccctggccaatctgcaacagtgctccgacaacaataatcccactaatcgcgttggtgacgctcatcaacggtgtatgcagcgcgtggcttacattccacaccacgtaataaccgacaacgcaggccagcgcgaaaacggtgaagtgcccaaggaattctttcggcgcaacgcttgccatccagccaaaaagaatgattgccagcgccatcaacgcgtatttacgccacggactgcaggtacatttttcctcagttttcacttccggtgccgctttttgtgccgcctgcggctgagcacttacctgaatcggcggtgccggccaggtaatttcgcccgcacggatcacggtcacgccgcgaatcaccacatcatcaaaatcaacagtgatattgccgtctttctctttgcacaacagtttcagcagattaacgaggtttgtgccgtaaagctgactggattgcgtcggcagacggcccggaagatcggtataaccaatcactttgacaccattttccgtagtgaagatttcacccggcacggtgtattcacagttgccgccgttttgggctgccaggtcgacaatcacactgcccgccttcatggagtcaaccatttcacgggtaattagcttcggcgctggtttgcctggaataagcgcggtggtgacaatgatatcgacctcttttgcctgggcggcaaagagttccatttccgctttgatgaacgcgtcgctcatcactttggcatagccatcgccgctgccagcttcctctttaaaatccagctcgaggaattccgcgcccatactttgaacttgttctttcacttccgggcgggtgtcgaatgcacgcacaatcgcgccgagactgtttgctgcgccaatggcggccagacctgcaacacccgcaccaatcaccatcacttttgccggtggcactttcccggccgcagtaatttgcccggtaaagaagcgcccaaattcatgtgccgcttcaacaatggcgcgataaccggcgatgttcgccatgctgcttagtgcgtccaggctttgtgcgcgactgatacgcggcacagagtccatcgccatcacggtcacgttacgttccgcaagtttttgcattaattccggattctgcgcaggccagataaaactcaccagcgttgtcccaggattcagtaacgcaatttcatcatctaacggcgcattgaccttcagaatgatctcactctgccagacgctattcccttctacaatttcagcgcccgcttgcacaaacgctttatcgtcaaaacttgccagttgacccgcgccgctctctaccgcgacggtaaaacccagtttcagcagctgttccactgtttttggcgttgctgcaacacgggtttcattggttaaccgttctcttggtatgccaattcgcatgatattcccttccatcggttttattgatgatggtttgcctgtgtcaggagccacacaagctgctcatgtacgagctaaatgttactccgttaaaataaattagtaacaaacgccctataacgtactgaaaattatgcctgtgatctagcgccaaaaatcagtatttcggcgtgaactcgcaaaatattaacgattcagccgtgatagtgggataaacaccttagaacgccggataaagactgataattgtcttcgacggtcgggtaaaacgagacatcgccccggcacgaatcactacttaacattaaattaacttatacaattcagttgcttcagtagtaatgatgctgatacggctgttttttaagcatagacggtcatttgagcaggattaaaattggcttaaggaatgtgatatgaaaaatgacgcagacagttacaccgtttaaatgcaataatcagccacgtttctcgttaataacaataccagtacctggtttgcgcaaggcgaaggattatttttatgaagcttaagaacaccctcctggcgagcgcactgctttctgctatggcattctccgttaacgcagcaacagaactgacaccggagcaagcggcagcggttaaaccttttgaccgtatagtggttaccggtcgttttaatgctattggcgaagcggtgaaagccgtttctcgtcgcgcagataaagaaggtgccgcctctttttatgttgtcgacacttctgattttggtaacagcggtaactggcgtgtggtcgctgacctctataaagccgatgctgaaaaagcagaagaaacaagtaatcgcgtaattaacggtgttgtcgaactgccgaaagatcaggctgttctgattgaaccgtttgacacggtcaccgtccagggcttctatcgtagccagccagaagtcaatgatgccatcaccaaagcggcaaaagcgaaaggtgcctactctttctacatcgttcgtcaaatcgatgccaaccagggcggcaaccagcgtattactgcattcatctataaaaaagatgctaagaaacgtatcgtccagagcccggatgtgatcccggcagattccgaagcaggacgtgcagctctggctgccggtggcgaagccgcgaagaaagttgagatcccgggtgttgcgactaccgcaagtccaagttctgaagtcggtcgcttctttgaaacccagagtagtaaaggcgggcgttacaccgtcacgctcccggatggcactaaagtcgaagaactgaacaaagcgaccgcagcgatgatggtcccgttcgacagcatcaaattctctggcaactacggcaacatgaccgaagtctcctatcaggttgcgaaacgtgccgcgaagaaaggtgctaagtattaccacatcacccgccagtggcaggaacgtggtaataacctgaccgtcagcgcagatctgtataaataactattcagttactcctataaggcggcttgatgccgcctttcgcatttttagtcacaaatttccccgcgaccattgcatgcagacacatctcttcgtaaaatcccgcgcttcagtggcaaactccatttttatgcgttttgccctaatatttattcttcttatcacgttttaatcactggatatcgatggaaaagaaactgggactgagcgcactcaccgcgctggtattaagcagtatgctgggcgcgggtgttttcagtctgccgcaaaatatggcggcagttgccagcccggcagcactgctcatcggctggggtattactggcgctggcattttattgctggcctttgccatgctgatcctcacgcgcattcgtcccgaacttgacggcggtatctttacctatgcccgcgaagggtttggcgagctaatcggcttttgttccgcatggggatactggctgtgcgcagtcatcgccaacgtctcctatctggtgatcgttttttccgcgttaagcttttttacggacacgccggaattgcgcctgtttggcgatggtaatacctggcaaagcatagtcggtgcaagcgctttattgtggattgttcactttttgatcctgcgcggggtgcaaaccgctgccagcattaacctggtggcgacactggcaaaattgttgccgctgggtctgtttgttgtgctggcgatgatgatgttcaaactggataccttcaagctcgacttcaccggacttgcacttggcgtacccgtttgggaacaggtgaaaaacaccatgctgatcaccctgtgggttttcattggtgtggaaggtgccgtggttgtttctgcgcgtgcgcgtaataaacgtgatgttggcaaagcgacactgctggcggttctctccgctctgggcgtttacttgctggtaacgctgcttagcctgggtgtggtggcacgtcctgaactggctgaaattcgtaacccgagtatggccggtctgatggtggaaatgatgggaccatggggcgaaatcatcatcgctgccggtttgatcgtttccgtttgcggcgcgtacttaagctggaccatcatggcagcagaagtaccgttcctggccgccactcataaagcattcccgcgcatttttgcgcgccagaacgcacaagctgcgccatccgccagtctgtggttgaccaacatctgcgtgcaaatttgtctggtactcatctggctgaccggttccgattacaacacgttgctgaccatcgccagtgaaatgattctggtgccctatttcctggtcggcgcgttcttgctgaaaatcgcaacccgtccactgcataaagcggtaggtgtcggtgcctgcatttatggcttatggttattgtacgcctctggtccaatgcacttgctgttatccgttgttctgtatgcaccggggctgctggttttcctgtacgcgcgcaaaacgcatacccatgataatgtactgaaccgtcaggaaatggtgctgattggcatgctgttaattgccagtgttccggcgacctggatgctggtgggataacgttcatcccatcgttggatagcaaaggagataacgatgggtaaaacccagcccttgccaatattaattactggcggaggtcgtcgcatcggcctcgccctcgcatggcatttcattaatcaaaagcaaccggtgattgtcagctatcggacacactatccagccattgatggactgattaatgcaggtgcgcagtgtattcaggctgattttagcaccaacgacggtgtgatggcgtttgccgatgaagtactaaaaagcacccatggtctgcgtgctattttgcataacgccagtgcgtggatggcggaaaaaccgggtgcgccactggccgacgtactggcttgcatgatgcagatccacgttaataccccatacctgctcaaccatgcgctggaaagattactgcgtgggcacggacacgccgccagcgatatcattcactttaccgattatgtggtggagcgcggtagcgacaaacatattgcgtatgctgcaagcaaagcggcactggataatatgacccgcagctttgcccgcaagctggcaccggaagtgaaagtgaattctattgcgccaagcctgatcctgtttaatgaacatgatgatgccgaatatcgacaacaggcgctgaataaaagtctgatgaaaaccgcgcctggcgagaaagaagtgatcgacctggtcgattacttacttaccagttgctttgtcaccggacgcagtttcccacttgatggcggtcgtcatctgcgttaatgcagctttatccagcatataatcaacacccatgcgcttatcccccaacacgcaacagaaccaacaaaagcggcgggcaagcgcatcattccggtgaaataccacaggctcaccaggtaaacaaaatagggaataatgctccacatactaaaaatgatggttgcgcgtaaggcttcaatgccgcgttcgctggcaacaatataatgcgcgataagcgcaaaggtcgggaaaagtggaatcagcccggcgatataataatttttcgtttttgctaaaacaccaatcaacagcactaccagcgcaccgagcgcggctttgattaccagccccatctttttaccttaacacttccataacaagtcatcagtagaatacctgatgaaaacttgtttagaaacgattgatagtaagtaaaaacagcgcggtgtattgtgacgtttttatatctaccgtgaatgttatgaacactatcgtatttgtggaagatgatgcggaagtcggtagtctgattgccgcgtacctggcaaaacatgatatgcaggttaccgtagagccgcgcggcgaccaggccgaagaaaccattttgcgagaaaatccggatttggtgttactcgacatcatgctaccaggcaaggacggcatgaccatttgtcgtgatttacgcgcaaagtggtctggaccgattgttcttctaacctctctcgatagcgatatgaaccacatcctggcactggaaatgggtgcctgcgactatattctcaaaacgacgccccctgctgttttgctagcgcgtttacgtttgcatttgcgtcagaatgagcaagccacactgaccaaaggtcttcaggaaacgtctctgactccctacaaagccctgcatttcggcacgttgaccatcgatcccatcaaccgcgtagtcaccctggctaacactgaaatcagcctcagcacagctgatttcgaattattgtgggaattagctacccatgccgggcaaatcatggaccgcgatgcattgctgaaaaatttacgcggcgtcagttatgacggactggatcgtagcgtggacgtggctattagccggttaagaaaaaaactgctcgataacgccgcagaaccttatcgcattaaaactgtgcgtaacaaaggctatctttttgcgcctcatgcatgggaataagcgatgaaaaaactgtttatccagttttacctgttattgtttgtctgcttccttgtgatgtctctgctggttgggctggtgtacaaatttaccgccgaacgcgcgggcaaacagagcctggatgatttgatgaacagtagcctgtatctgatgcgcagcgaattgcgtgagatccccccacacgactggggtaaaactctgaaagagatggatttaaatctctctttcgatctgcgtgtcgagccactgagtaaataccatcttgatgatatttccatgcaccgactgcgtggcggcgaaattgtcgccctggacgatcagtacacgtttttgcagcgtatcccgcgcagccactacgtgctggcagttggtcctgttccttatctttattatctccatcagatgcgattgctggatatcgccctgatcgcttttattgctatttccctcgcctttccggtgtttatctggatgcgtccgcactggcaggatatgttaaaactggaagcagcggcgcaacgatttggcgatgggcatctcaatgaacgtatccactttgatgagggtagcagctttgaacgacttggcgtcgcatttaaccagatggcggacaatatcaacgccttaattgccagcaaaaaacagcttattgacggtatcgctcacgaactgcgaacaccgttagtgcgcctgcgttatcgactggagatgagcgataacctgagcgccgccgaatcccaggcgttgaatcgtgatatcagtcaacttgaagctttaattgaagagctgctgacttatgcccgactcgatcgcccacaaaacgagcttcatcttagcgaaccagacctgccgttgtggctgagtacgcatctggcagatattcaggcagtaacgcccgataaaacggtacggataaaaacgctcgtgcaaggccattatgcggcgttggatatgcgcttaatggagcgcgtgctggataatttgctcaataacgccctgcggtactgccatagtacggttgaaaccagcctgctactgagcgggaatagagcgacattaattgttgaggatgatggcccagggattgccccagaaaaccgcgaacatatctttgaaccttttgttcgcctcgatcccagccgggatcgcagtaccggcggctgcgggctggggctggcaattgtccactctatagcactggcaatgggcggtacggttaattgtgacaccagcgaactgggtggtgcccgcttcagctttagctggccgttatggcataacatcccgcaatttacctctgcctgacactacgcgcacgatggtcaagtcaccacgactgtgctataaaataagtatgttgtaactaaagtggttaatattatggcgcgttacgatctcgtagaccgactcaacactacctttcgccagatggaacaagagctggccatatttgccgctcatcttgagcaacacaagctattggttgcccgcgtgttctctttgccggaggtaaaaaaagaggatgagcataatccgcttaatcgtattgaggtaaaacaacatctcggcaacgacgcgcagagcctggcgttgcgtcatttccgccatttatttattcaacaacagtccgaaaatcgcagcagcaaggccgctgtccgtctgcctggcgtgttgtgttaccaggtcgataaccttagccaagcagcgttggtcagtcatattcagcacatcaataaactcaagaccacgttcgagcatatcgtcacggttgaaagtgaactccccaccgcggcacgttttgaatgggtgcatcgtcatttgccggggctgatcacccttaatgcttaccgcacgctcaccgttctgcacgaccccgccactttacgctttggttgggctaataaacatatcattaagaatttacatcgtgatgaagtcctggcacagctggaaaaaagcctgaaaagtccacgcagtgtcgcaccgtggacgcgcgaggagtggcaaagaaaactggagcgagagtatcaggatatcgctgccctgccacagaacgcgaagttaaaaatcaaacgtccggtgaaggtgcagccgattgcccgcgtctggtacaaaggagatcaaaaacaagtccaacacgcctgccctacaccactgattgcactgattaatcgggataatggcgcgggcgtgccggacgttggtgagttgttaaattacgatgccgacaatgtgcagcaccgttataaacctcaggcgcagccgcttcgtttgatcattccacggctgcacctgtatgttgcagattaacgcccggctttcatactgccgaccatctgttctggccgtacccagctgtcaaactcggcttcgctaagataccccagcgcaagggccgcagcttttaaggtcagcccttctttatgcgcttttttggcgatctcggcggctttgtcataaccaatgtgggtgttaagcgcagtcaccagcatcaggctttcattgagtaattgattgattcgctcacgattcggttcaatacccactgcgcagtgtttgttaaaactttccatgccatctgccagcaagcgcacgctttgcaggaaattgtggatcaccattggacggaagacgttcagttcaaagttaccggaagcgccccccatgttgatcgccacgtcgttccccatcacctgacagcagagcatggttaatgcctcacactgtgttgggttcactttccccggcatgatactgctgcccggctcattttccgggatactgatttcaccaattccgcagcgcgggccagaggccagccagcggacatcattggcgattttcatcagactcgcagccaaccctttcaacgcgccgtgcgcctgaaccagggcatcacaggtcgccagcgcttcaaatttgttcggcgcggtaacaaacggtgcacaggtaatgactgccagttcatctgctacgcgacgcgcatactccggatgggtatttagtccagtacccaccgctgtaccgccaagagccagttccgctacgtgaggcaggctgtattcgatatgtttgagattatgctcgagcatcgctacccagccggaaatctcctgccccagcgttaacggcgtggcatcctgcaagtgagtacgaccaattttgacgatatcggcaaaagcacgggatttctcattcagtgtctgtgtcagggttttaagctgaggaatgagttgcttgcgcagcgccagcagcgccgcaacgtgcatcgccgtcggaaagacatcgttggaactttggcttttgttcacgtcgtcgttagggtgaactttacgttccatcccgcgcacaccgccgagtaattcactggcccggttagccagcacttcgttcatgttcatgttactttgcgtgccggagccggtctgccagatagccagcgggaattcgtcgtcatgctgtcctgccagtacttcatccgccgcctgacgaatggcgctcgctttctcttcagacaacaagcctaaatcttcattaacttttgccgctgcacgcttggttagcgccagcgcatgaatcagactggtgggcattttctccgtgctaatgcggaaatgctccaggctgcgttgagtttgtgcgccccacagcttatctgccgggacatcaatcgcccccatgctatctttttcgctgcgtactgtattcatgacctgctcctcacctgattaattttttctttctgttttgctttcgttaagcaacttttagctcacttattatttaccatttgataacaaatgtttggtctttcgtgccatgtaaaaaaaccgccccgaagggcggctctgtttatttcacacagcgggtgcattgtgtgagttgtatctgctggaagaagtcatttcctttatcatccacaaggataaacgccgggaaatcttccacttcaattttccagatggcttccattcccagttccggatattcaacacattccaggctcttaatacttccctgcgccaatacagcggccggaccaccgatactgccaaggtagaagccgccgtgttttttacaggcatccgtcacctgctggctgcggttgcctttcgccagcatgatcatacttccgccctgcgcttgcagttgatcgacataagaatccatccgtccggcggtcgttgggccaagagaaccggaggcataaccttccggcgttttggccggacccgcgtagtaaatcggatgatctttgatgtactgcggcagcccttcaccgttatccatccgctctttcagtttggcgtgagcaatatcacgaccgacgataatcgtgccgttaaggcttaagcgtgtagaaacgggatactggctcaactgtgcgaggatctctttcatcggacggttaaggtcaacgcgcaccgcttcgccttctcccgctttgcgcagctcttccgggatatatttgcctggattatgttccagtttttcgatccagatcccctgacggttgatcttcgctttgatattacggtcagcagagcaggagacgcccataccgaccgggcaggatgcgccgtgacgtggcaggcgaatcacgcggatgtcgtgagcgaagtatttaccaccaaactgcgcacccagaccaagattttgcgcttcgatcagcaattctttttccagttccacatcgcggaacgcctgaccgtgctcattcccttccgttggcagttcatcatagtatttcgcggaagccagtttcaccgttttaaggttcgtttctgcagaagttccaccaataacgaacgcaatatgatacggaggacaggccgccgtacccagcgtgcgcatcttctcaaccaggtaatttttcagtttccccggcgtcagtaacgctttggtttcctgatagagatacgtcttgtttgcgctaccaccacctttggcgatacagaggaatttgtattcgtcgccatcaacggcataaagatcgatctgcgctggcagattggtgccggtattcacttctttatacatatccagcggcgcgttttggctgtagcgcagattatcttcgatataagtgttatagacaccgcgcgccagcgccgcttcatcaccaccaccggtccatacacgctgcccttttttaccaacaataatcgcggtgccggtatcctgacaggttggcagaacgcctttcgccgcgatgtcggagttacgcaggaattgcagcgccacatatttatcattttcgctggcctccgggtcacgcagaatgtcggccacctgttgttggtgcgccggacgcagcatgaagctcgcatcatgaaacgcctggcgcgccaacagagttaacgcttcgggtgcgactttcaaaatctcctgcccttcaaattcagatacgctaacgtgttcgctggttagcaggtaatactcagtatcatcttttttgagtggaaaaggagcctgataatgaaagggtttgttactcattgttctctcacttactgcctggtttggttatgctctgggcgggtgttccgttgccctgttaaaagcgagtaacaatatcctacacacttttttaacaaaaactgagactagtacgactttttgcggctccaggttacttcccgtaggattcttgctttaatagtgggattaatttccacattaaaacagggattgatcatgcaaaaactcattaacagtgtgcaaaactatgcctggggcagcaaaacggcgttgactgaactttatggtatggaaaatccgtccagccagccgatggccgagctgtggatgggcgcacatccgaaaagcagtagtcgagtgcagaatgccgccggagatatcgttagtctgcgtgatgtgattgagagtgataaaagcactctgctcggagaggccgttgccaaacgctttggcgaactgcctttcctgttcaaagtattatgcgcagcacagccactctccattcaggttcatccaaacaaacacaattctgaaatcggttttgccaaagaaaatgccgcaggtatcccgatggatgccgccgagcgtaactataaagatcctaaccacaagccggagctggtttttgcgctgacgcctttccttgcgatgaacgcgtttcgtgaattttccgagattgtctccctactccagccggtcgcaggtgcacatccggcgattgctcactttttacaacagcctgatgccgaacgtttaagcgaactgttcgccagcctgttgaatatgcagggtgaagaaaaatcccgcgcgctggcgattttaaaaagcgccctcgatagccagcagggtgaaccgtggcaaacgattcgtttaatttctgaattttacccggaagacagcggtctgttctccccgctattgctgaatgtggtgaaattgaaccctggcgaagcgatgttcctgttcgctgaaacaccgcacgcttacctgcaaggcgtggcgctggaagtgatggcaaactccgataacgtgctgcgtgcgggtctgacgcctaaatacattgatattccggaactggttgccaatgtgaaattcgaagccaaaccggctaaccagttgttgacccagccggtgaaacaaggtgcagaactggacttcccgattccagtggatgattttgccttcagcctgcatgaccttagtgataaagaaaccaccattagccagcagagtgccgccattttgttctgcgtcgaaggcgatgcaacgttgtggaaaggttctcagcagttacagcttaaaccgggtgaaagtgcgtttattgccgccaacgaaagtccggtgactgtcaaaggccacggccgtttagcgcgtgtttacaacaagctgtaagagcttactgaaaaaattaacatctcttgctaagcttattaaaggcttataacaccttcaggcggccagtccgcctgatttcattttatggataatcattatgaataaaagcctggtagcggtaggcgtcattgttgcgctaggcgtagtctggacaggcggcgcatggtatacaggcaagaagattgaaacccatctcgaagacatggtcgcgcaggcgaacgcgcaactcaaactgacagctcctgaatccaacctggaagtgagttatcaaaactatcatcgcggcgtattcagcagccagttgcaactgttggtgaaacccattgccgggaaagaaaatccgtggattaaaagcggtcagagcgtcatcttcaacgaaagcgttgatcatggtcccttcccgcttgcccagcttaaaaaactgaacctgatcccgagcatggcaagtattcaaaccacgctggttaataacgaagtaagcaaaccactgtttgatatggcaaaaggtgaaacgccttttgagattaacagccgcattggttacagcggtgattccagttccgatattagcctcaagccactgaattacgagcaaaaggatgaaaaagtcgcctttagcggcggcgagttccagttaaatgctgacagagacggcaaagccatctccctttccggggaggcgcaaagtggtcggatagacgcagttaacgaatacaaccagaaagtgcagttgacctttaataatctgaaaaccgacggttccagcacgctggcaagttttggtgagcgtgtaggaaatcaaaaactgagtctggaaaaaatgaccattagtgtggaaggcaaagaactggcactgctggaaggcatggagatcagcggtaaaagcgatctggtcaatgacggtaaaacgatcaatagccaactggattacagcctaaacagcctgaaggtacagaatcaggatctgggcagcggcaagctgactttaaaagtcggccagattgatggtgaagcctggcatcagtttagccagcaatataacgcgcaaactcaggcgctgctggcacagccagaaattgccaacaaccccgaactttatcaggagaaagtgacggaagccttctttagcgccctgccgctgatgctgaaaggcgatccggtgattactatcgcgccgctaagctggaaaaacagtcagggtgaaagtgccctgaatctgagcctgttcctgaaagatccggcaacgactaaagaagcgccgcaaacgctggcgcaggaagtagatcgtagcgttaaatctctggatgcgaaactgaccattccggtggatatggcaactgagtttatgactcaggtagcgaagctggaaggttatcaggaagatcaagcgaaaaaactggcgaaacagcaagttgaaggtgcaagtgcaatggggcagatgttccgtctgaccaccttgcaggacaataccatcaccaccagcctgcaatatgctaacggtcagataacgttaaatgggcagaaaatgagcttagaagattttgttggcatgtttgcgatgccagctcttaacgttccggctgtaccggcaattccgcagcagtaattcacggccaaaacgccggagaattttcactccggcgttttcatctgaaaacaaaccagagattgcctgatgcgctacgcttatcaggcctaccttttcctgcaacactttgaatttatgagtttttgtaggctggataaggcgtttacgccgcatccggcataaaaaacgcgcactttgtcaacaatctgaaacgccggagatttttctctccggcgttattttttacttcagcataaagtcatactgaatactcattttcacatcccagtaattcaggcgatcgcccagcgtactgccatcgcgcttttcccgccctttatcggcagcaagaaagaaattcatcccttgtaacggcccttcgctgacccgatagttcataccacctaagatacccgtgccttcaatccgcacatctcgtttactggattcatagccgcgagtcacaatcggtgcaaatgtcagcgtaaattgcggcgttaaacgatagttgacgcccaattgccaggactgcattccttcacggttacgatcaagacttaaactaaagggatagccaatgtcggtatccaccacggcaccattcattgcatggcgcaaataaccaccactgccaaatacacttccccacggcgcattccaggtcaattgtccactaaccaacgccgtttcattgggctggctggtattacgacttaaaccttcgagctgcgcgtaaaagccgagcaactcccctttcaacgtataattcgggtcgagcggtatgcttttctcgagaatactttgtatctgattggaaacatctttctgtacgcttgcccccagagaatagcgactggtatcatcatgccaactggcggctaaaaaagaacgtgcgcgatgtttatcgtattttcccgtctggctgttatacaccccttcatcacgaataccggttgtactatcagtccataaaaatactcgactacgccacattccccacagatcaatatttggtgttaaagcccaataacctaatgctccttcagaaactgtcggtaatgtacgttggctactgccagccattaacggaatacgataaggtaagctaccataactataatccgtcccgaagcgacctaatttaagcaggctattttcactgggttttatttttactgcccccagggcaaagccaaaacttttatcaccatcaagataccaccgggtactcatatcagcacgagcacctaatttataaacataatacgccccgccttcaacgccaataatattggaataataaccactattgaaatcgagcaatcctccctgtacccatgcgtaaatatctcttcccgcgccagcactgggcttatccgccctgcgcaattcgtttttcagtctgatgcgtagtcccgcttcatcgtcagccagttgcgccgcataagcagaggtaaggccagaggcagccgtcaggcaaataacggccatggccactatttttctcatagttgcacctttgatgttctgattatttttattgaatattaattagtgatatcgctgattaattgctgctgcacttttttacgattatcaatttcaaccacgatttctttgaattttttatccgtgagcggataaaaccagataataacgaatgccagtagcataaatccgcaaggtactaaggcaatacttgtgcggatgcccataataacttccggcgtttgcacctgattggcgatatatccgcttaaccccaaaataaaggcaggaatactacctccgattgcctgaccgcatttacgggtaaaactgaatagactataggtgagcccttcaattcgcacgccggtcaggtattcaccgtattctacggtatcagcttccagcgcccacatcacggtcatggtaacgccctgaccaatactagcgatggccaacgcaaccaacgccaccggcagactccagacggaaacccagaagaacagcagataaccgcaggttcccagcaaagcgccaatcaggaaggtattctttttaccgatcctcgcgaccatccccggcaccagcggtgcgcttgccacagtaccaaccaggttttgcaccagtaccagcacagtgaacagcccggtatcatttaacacatagcgcacgtagaacaagctgctggcgctgaccgcaaaggtgctaatcagcacacacagcgcaccgatgcacaacataaacagcgggcgattccgtttcagggtttgcagactgatattcaaactcggctgcgcaacgatacgtaccacattctcacgcgtgcttttgaagcagatgaagtaaagcaccattccggcaatcgccagcacaattgtccagaaatggtatacgctcaccatctcttccgggctggagttcttaatgctcggtcctatcagaaatgccaggcagacaaaggtcaaactagcggcaatcccacgagccgcgcccagacgggcgcgggattgtggttgttgggtcatcgcggtagcaagactaccataaggaatattcaccaggctgtagcaaagcccgaggcccatgtaggtcaaatatgcatacaccactttgctaccatggctccagtcggtcagcacccagaataccagcacgctgaagatcattaacggcgcagtaccgaagagtaaaaacgggcggaattttccccagcgggtattcacactgtccaccactcgtccggcaaagacgtcggcgaaggcatcgaatacccgcaccagtaacagcatggtgcccgccgcagcggcaccgacgccagcgacgtcggtgtagtaactcaacaggaagagcgcccccattgcgaaggcgaagttattggcgacgtcaccgaggctgtagccgacgatggtgcgccaggagagttgttgattcattgtttgcctccctgctgcggtttttcaccgaagttcatgccagtccagcgtttttgcagcagaaaagccgcgctcttcggtttgcggtcgcgagtgaagatccctttcttgttaccgccaacgcgcaatatgccttggctggtcgcaaaatcggcgaaattccatacctgttcaccgacgacggcgctgacgcgatcaaagacgcggtgatacatatccagccatgcacactgatactcttcactccacatgtcggtgtacatactgtgcagcccggctaacgtatccacgccgtattcggtgatgataatcggctgatgcagtttctcctgccaggccagaagttctttttccagtaccttctctgccgtttccaaatcgccgctttggacataccatccgtaataacggttcaggcacagcacatcaaagagatcgctgatggtatcggtgtgagcgtcgcagaacattacattgacgcaggtgatcggacgcgtcgggtcgagtttacgcgttgcttccgccagtggcgcgaaatattcccgtgcaccttgcggacgggtatccggttcgttggcaatactccacatcaccacgcttgggtggtttttgtcacgcgctatcagctctttaatcgcctgtaagtgcgcttgctgagtttccccgttgactgcctcttcgctgtacagttctttcggcttgttgcccgcttcgaaaccaatgcctaaagagaggttaaagccgacagcagcagtttcatcaatcaccacgatgccatgttcatctgcccagtcgagcatctcttcagcgtaagggtaatggctggtacggtaggagttggccccaatccagtccattaatgcgtggtcgtgcaccatcagcacgttatcgaatcctttgccacgcaagtccgcatcttcatgacgaccaaagccagtaaagtagaacggtttgtggttaatcaggaactgttcgcccttcactgccacactccggatgccgacgcgaagcgggtagatatcacactctgtctggcttttggctgtgacgcacagttcatagagataaccttcacccggttgccagaggtgcggattcaccacttgcaaagtcccgctagtgccttgtccagttgcaaccacctgttgatccgcatcacgcagttcaacgctgacatcaccattggccaccacctgccagtcaacagacgcgtggttacagtcttgcgcgacatgcgtcaccacggtgatatcgtccacccaggtgttcggcgtggtgtagagcattacgctgcgatggatcccggcatagttaaagaaatcatggaagtaagactgctttttcttgccgttttcgtcggtaatcaccattcccggcgggatagtctgccagttcagttcgttgttcacacaaacggtgatacgtacacttttcccggcaataacatacggcgtgacatcggcttcaaatggcgtatagccgccctgatgctccatcacttcctgattattgacccacactttgccgtaatgagtgaccgcatcgaaacgcagcacgatacgctggcctgcccaacctttcggtataaagacttcgcgctgataccagacgttgcccgcataattacgaatatctgcatcggcgaactgatcgttaaaactgcctggcacagcaattgcccggctttcttgtaacgcgctttcccaccaacgctgatcaattccacagttttcgcgatccagactgaatgcccacaggccgtcgagttttttgatttcacgggttggggtttctacaggacgtaacataagggactcctcattaagataataatactggtcaacctttaatctgattagttaaccaattctgtgttgcacacagttatctgtgagaaacccatggaagagaaatggaaataaaaagaactgacaccgcgatcaaaaaaccaaaaactgcaatacccacagcgtgatatagatcgcattaatctttaaaacagcgttgacagaagccataaaataagcaaccgaacgttcgttcgagcgtattgggaacgataaactctcatgacatatggctacagtgaatattttggggggaattctccgaagccgggaaggataatttttgcacagagaaattacgatatgaaacgcgggcacagttatcaccagcccgccgaaaaagagagagaatcaggatgcggttaagataccgccaatcatcgcgcgtaatccctgagcaaagctcgcttcacgcgccaggtcttccgcttcgatatcggccagtacaccgtaggtcagatccagcagtaaacgactagtcattgccgtgttgatgtctgggcttatctcgcctttttgctgggcatcacgcatccgctgggcaacaaattccgtgatcgtcatatgcttatttttaagcatggcggcgacctgtgggttacgcatcccttccgccataatttcaaccaccagcgcccgttgtccaaaggcttcatgggtgagagagacaatggactcgaccatatagtcaacgaaatgaatcccttcaatcggttcccggaaacgggccagcgccctctcctggtcctgtaagataatcgcctgaatcaaggcttctttggagatgaaatggtgatagagcgtcccgggactaatggcgcaagatttacagatggctttcatgctggcactgtgaaatccattttcactaaaaatctctctggcagcattgaggatccgggtccgtgtcggttgtgcttcagtctgcatgttatccatcattaaaccattatagttagcgtgaataactagtttaccgcgttgtcaggtgagcgcctatcattgctgttgaatagtgcgaaggcacactctattcgtatacttttcactctgaaattggttaaccaatagccgtgatttggctgccagttatttagcagagacgttgatgagtttatcccggtaaacaacacgcacggttgtttaccggtccgttagtgtattaattgagctcctgtaccccaccaccggagacggtgagaatttgtccgcttacccagctcgcagcagggctgcaaaggaacagcgctgcgttagcaatatcttgcggttggcccagacgtctgatcggcgtgtgctgtaacattttttgttcaatttctggtgtaataacggatttcagggcatcggttaatattgcccccggcgcaatgccatttacccgaatatttttttcacccaggtcaaacgccatatttctgaccagatgactggccgcagctttagaacttgcataggaagtcatgtttatatttttattttctgccgccatagaagtgatggtcagaataacgccaccgccatttttttccatttctggcgcaacaagttgactcagatggaaaaaagaaaacacattcagttcataagcacggcgaaaatccgccattggcatatcaaacggtttaggtccaccgccaccggcgttgttaaccagaatatcaactttacccagcttactgatagcaaagtctgccagtgcagagagttcctgttcggaagtaatatcacaacggcaggcaaatgcctgaccacccagttgttgaatttcgtctacaacatggttagctgcgtcggcgttaatatcactgaccaccacagatgcgccagctgtcgcgaatgtaatggcgatttctttaccaatacctgcacccgcacctgtgatgatggcgcattttccgtcgagtctcaggttgtcagaattaaacacataaacctcctgtgaacttcagtaaaaataaaaggcaccgcctgtgtgccacattttttatcattaaccttgaggaaaggacactaccaggtatagcagataaagagaggattatttcgctgcaatgagccgggcgggaataataagattgcgactatgcgtctcttcatgggtgattttttgcatcatgcgatccgcaagtgtgataccaagttcccgcgctggcgtgctggcccaggtaacaggtatatcatcaagtgtggttggtgtcgcatcggtaaatgccgccaggctaacctgttgctcaaagtaacgatcgactccgctttccccgctttgccgccctgctttgagcaaaccaaaccatgcccccatcgcaatagtttcgttatagcaaaccacggcactgatggtcgggttatgacgtaaaagcgccgtgatagcttccgcggcttgcttctggctggaagtgcactccaacacccaatcgctatgaaacggcaggccaaattttagtagagttgcacaatagcccccaacccgttctgcacgggttaaactggaactttgccctcccagccaggcgatccgctgatgcccattgcgaatgagatgctccgtcaacaactgtgcagcctgcatgttgtccgggcgaaccgtatcaacatcatcaagataactggcacgggaagcgaaaatcaccgggatagctttttcttctgccatccgtcgcaggtcatcgctacttcctgcagctccggcaattaccacaccatcgacaccctgattcagtaacagactaaaccgctgtgccagctgctcaccgtctttaccgccgtgaagcaaaaaaaccatccgtccctgcgcttccagagcttccgtcaatccggccgtcaattcggcgtaaaacggcgcagataaatcacggacgatcaaaccaatgacgccgctttgcccgccgcgcagcgcgctcgcctggcgattgcgcacaaatcccagctcttcaatggcggcgttaacgcgttctcctgtggcggtagagattcgccctttgccactaagcaccaggctaacggtacttacgctcacgcccgcagccagcgcaacatcatgaatggttatttttttggcggtagccatgcagatgacctactccctgattatgtgacagataaaacgttttaccttttatttatcttatacccgctattatcgttgcgtaatgtgatttatgcctcactaaaatttgataaaacgttttatcttctcgcgcaatttactgaatccagattgttctctacgaggagtcgttttatgacggcgaaaacagcaccgaaagtcacgctgtgggagttcttccagcagttaggcaaaaccttcatgttacccgtggcattattgagcttctgcggcattatgctcggcattggtagttctcttagcagccatgatgtcataaccctgatcccggtcctgggcaaccccgtgttgcaggctatctttacctggatgagtaagattggcagctttgcttttagtttcctgcctgtcatgttctgtatcgccatcccgctgggcctggcacgcgaaaataaaggcgtagcggcattcgctggcttcatcggttatgcggtaatgaacctcgcggtaaacttctggttgaccaataaaggcattctgccaaccacggatgccgcggttctgaaagccaataacatccagagcattcttgggatccagagcatcgataccgggatcctcggtgcggtgatcgccggtattatcgtctggatgctgcatgagcgtttccataatatccgcctgccggatgcgctggcattcttcggcggtacgcgcttcgtaccaattatctccagcctggtgatgggccttgtcggcctggtgattccattagtctggccgattttcgccatgggtattagcggcttgggccatatgataaacagcgcgggtgatttcggaccgatgctgtttggtaccggtgaacgtctgctgttgccgtttggtctgcatcacattctggtggcattaattcgctttaccgacgcaggcggcacgcaggaagtctgcggtcaaaccgtcagcggcgcactgaccatcttccaggcgcaattgagttgcccgaccactcacggtttttctgaaagcgccacgcgtttccttagccaaggtaaaatgcctgcgtttctcggcggtctgccaggtgcagcgttagctatgtatcactgcgcgcgcccggaaaatcgccataaaattaaaggtctgctgatttctggcctgatcgcctgcgtcgttggcggcactaccgaaccgctggaattcctgttcctgttcgtagcgccagttctgtatgtcatccacgcgctgttaaccggcctcggcttcaccgtcatgtctgtgctcggcgtcaccatcggtaataccgacggcaatatcatcgacttcgtggtgttcggtattttgcatggtctgagtaccaagtggtacatggtgccagtggtggcggcaatctggtttgtcgtttactacgtcatcttccgtttcgctatcacccgcttcaatctgaaaaccccggggcgcgatagcgaagttgccagcagtatcgaaaaagccgttgccggtgcgccgggtaaaagtggttacaacgttcctgcaatcctcgaagcattaggcggtgccgacaatattgtcagcctcgataactgcattacccgtctgcgtttgtctgtgaaagatatgagccttgttaatgtgcaggcactgaaggacaatcgggcaattggcgtagtacaacttaatcaacataacctgcaggttgttatcgggccacaagttcagagtgtaaaagatgaaatggccggtctgatgcatactgtccaggcataaggataagatatgttcgattttagtaaggtcgtggatcgtcatggcacatggtgtacacagtgggattatgtcgctgaccgtttcggcactgctgacctgttaccgttcacgattagtgacatggattttgccactgccccctgcattatcgaggcgctgaatcagcgcctgatgcacggcgtatttggctacagccgctggaaaaacgatgagtttctcgcggctattgcccactggttttccacccagcattacaccgccatcgattctcagacggtggtgtatggcccttctgtcatctatatggttagtaaactgattcgtcagtggtctgaaacaggtgaaggcgtggtgatccacacacccgcctatgacgcattttacaaggccattgaaggtaaccagcgcacagtaatgcccgttgctttagagaagcaggctgatggttggttttgcgatatgggcaagttggaagccgtgttggcgaaaccagaatgtaaaattatgctcctgtgtagcccacagaatcctaccgggaaagtgtggacgtgcgatgagctggagatcatggctgacctgtgcgagcgtcatggtgtgcgggttatttccgatgaaatccatatggatatggtttggggcgagcagccgcatattccctggagtaatgtggctcgcggagactgggcgttgctaacgagcggcagcaaaagtttcaatattcccgccctgaccggtgcttacgggattatagaaaatagcagtagccgcgatgcctatttaagcgcactgaaaggccgtgatgggctttcttcccctagcgtactggcgttaactgcccatatcgccgcctatcagcaaggcgcgccgtggctggatgccttacgcatctatctgaaagataacctgacgtatatcgcagataaaatgaacgccgcgtttcctgaactcaactggcagatcccacaatccacttatctggcatggcttgatttacgtccgttgaatattgacgacaacgcgttgcaaaaagcacttatcgaacaagaaaaagtcgcgatcatgccggggtatacctacggtgaagaaggtcgtggttttgtccgtctcaatgccggctgcccacgtagcaaactggaaaaaggtgtggctggattaattaacgccatccgcgctgttcgttaaccccaattgcgcaacgtaaaaaatcgttgcgcaatcgtggatttttaccctgctttgtttttataatggtgcgcacttttatatccagaaaaagagtgcgaccatgattgataccaccctgccattaactgatatccatcgccaccttgatggcaacattcgtccccagaccattcttgaacttggccgccagtataatatcagccttcctgcacaatccctggaaacactgattccccacgttcaggtcattgccaacgaacccgatctggtgagctttctgaccaaacttgactggggcgttaaagttctcgcctctcttgatgcctgtcgccgcgtggcatttgaaaacattgaagatgcagcccgtcacggcctgcactatgtcgagctgcgttttagtccaggctacatggcaatggcacatcagctgcctgtagcgggtgttgtcgaagcggtgatcgatggcgtacgtgaaggttgccgcacctttggtgtgcaggcgaagcttatcggcattatgagccggaccttcggcgaagccgcctgtcagcaagagctggaggcctttttagcccaccgtgaccagattaccgcacttgatttagccggtgatgaacttggtttcccgggaagtctgttcctttctcacttcaaccgcgcgcgtgatgcgggctggcatattaccgtccatgcaggcgaagctgccgggccggaaagcatctggcaggcgattcgtgaactgggtgcggagcgtattggacatggcgtaaaagccattgaagatcgggcgctgatggattttctcgccgagcaacaaattggtattgaatcctgtctgacctccaatattcagaccagcaccgtagcagagctggctgcacatccgctgaaaacgttccttgagcatggcattcgtgccagcattaacactgacgatcccggcgtacagggagtggatatcattcacgaatataccgttgccgcgccagctgctgggttatcccgcgagcaaatccgccaggcacagattaatggtctggaaatggctttcctcagcgctgaggaaaaacgcgcactgcgagaaaaagtcgccgcgaagtaacaaaatggatggtgcaaatgcaccatccatttttcatgcaaggcacaaagtcgcgcgatgtttggcggattcgatgcccagctcaatcaactccattacctggattgcctggcttgccggaaccggattttcaccatcgccatttaacgcatcacgaatagccgcatagtaagccggataattcccaggcaccgtcaacagcgtttcttcgacacgttcctcaccttccacgcgggtaagtacgccatcacgcatatcgtagccccagtcttcctgcggtagacgctcgccatttttcagacgttcttcctgtggatcgaggccatatttcacataactgcctcgggatccatgcacgatataccgtgcactctcagcggctgccagcatggtaccgtgtaaaatgactcgccgctgtggataggacaagatggcgtggaaataatcggtgctctgcgctccgggccgtaactgtgccaaatctaccgtcatgctgaccggtaaaccaaaaagcgtaatggcctgatcaagaagatgtggtgctaaatcgtaccagataccgctgcctgggccgccctgttcacgccaacgatcgcgcacctgcggacggaagcggtcaaaatgagactcaaagtaagcaacttcacccagcacgccttccgcgagtaaaccttttagcgtcaagaaatcgctatcccagcgacggttatggaatacagacagcacacgccccaggctttttgccagcgcatccagctctcgcgcttgactcagtgtcacggtaaagggtttatcaacgaccacatgtttacccgcctcaagcgccgctttggctaacgggaaatgggtatcgttgggtgtaggaatgacaatcaggtctatgttgggatcgttaaacagatgcttcggctcagagacaaccgtaaccgttggccagtcggcttttacttttgtttcatcactgctggagattaccgccagttcctgcccgggcgtgcccgcaatcaggggcgcatggaaggttttgctcgcataaccatacccaatcaacccaacacggatgttgtcgctcatgtcattgcctctcattgaagtatgatggctatttgacactatcctttacccacgctcaacagtttaataacctgccagcaataagggatgttgtttaacttaagtcaaaaaaatagcgaattttccaacgacaaaagctaaatatcgcaaaaacctcagtaaaaatcttgctggagctattattgctaagtaacatttaccccctgaagttaatggatcaatcaagagagatgtgggctgtaatgaatcgtcttattgaattaacaggttggatcgttcttgtcgttagtgtcattcttcttggcgtggcgagtcacattgacaactatcagccacctgaacagagtgctagcgtacaacacaagtaagctctgcacttgtggagcgacatgctgcccgtccgggtgcatgttttcacttgtcggatattaaaccaggaatttattatcttgttcgatgttgttggtgattgtcagggatagtaaagcgcgttactcttttcagagcagtttttcatccctgaatatttgccatcagcgcattcttattattgtaataacacaagcgttcacttttggtgaaattttatcatcactaataatacctacccctttggtattaattattttatggaccttttatgactgttcaggactacttattaaaatttcgcaaaatcagtagtctcgaaagtctggaaaaactctacgaccatcttaattacaccctgacggacgatcaggaactgatcaatatgtatcgtgctgccgatcaccgtcgcgcagagctggtttctggcgggcgtttgtttgacctcggccaggtaccgaagtccgtctggcactatgtccaataaagaaagtagcgatcggttataaaagccttataataacgcccctaaaattagatttgcctgtttgcgtcgctattctggagaacctatgaccaccacaacgccacaacgtattggaggctggttgcttggcccgttggcctggcttttagtcgctctgttgagtacgacgctggcgttgttgctgtataccgctgcgttatcttctccgcaaacatttcaaacgctcggcggacaagcactgacgacacaaatcttatggggcgtttcttttattaccgctatcgccttgtggtattacacactgtggttgaccatcgctttctttaaacgtcggcgttgtgttcctaaacactatattatctggctgcttatttccgtattgctggcagtaaaagcattcgcttttagtcccgtggaagatggcatagccgttcgccagttgctgtttactttgttggcaaccgcattgatcgtcccctatttcaaacgcagcagccgggtaaaagcgacgtttgtgaatccgtaataaccttacagttaacctgttgtcgcctgctctggattaacggataataggcggcttttttatttcaggccgaaaaatgactgactacctgttactgtttgtcggaactgtactggtcaataactttgtactggtcaagtttctcggtctctgtccgtttatgggggtttccaaaaaactggaaaccgcgatgggcatggggctggcaacaacgtttgtgatgacgctggcgtctatttgcgcctggcttatcgatacgtggattttgatcccacttaatctgatttacctgcgcaccctggcatttattctggtgattgctgtggtcgtgcagttcaccgagatggtggtgcgcaaaaccagcccggtgctttaccgtctgctggggatttttttgccgcttatcaccaccaactgtgcagtgctcggcgtggcgttgctgaatatcaatctcgggcacaatttcttgcagagcgcgctgtacggtttttccgccgctgtcggtttcagcctggtgatggtgctcttcgccgccatccgcgaacgccttgctgtggctgatgtcccggcaccttttcgcggtaatgccattgcgttaattaccgcaggtcttatgtctctggcctttatgggctttagtggtttggtgaagttgtaatgaatgctatctggattgccgttgccgccgtgagcctgctgggcctggcgtttggcgccattctgggttatgcctcccgccgttttgcggtggaagacgatccggtcgttgagaaaattgacgaaatcttaccgcagagccagtgtggtcagtgcggttatcccggctgtcgcccctacgcggaagccatcagctgtaacggtgaaaaaatcaaccgttgcgccccaggtggcgaagctgtgatgctaaaaattgccgagttgcttaatgtcgagccgcagccgctggatggcgaagcgcaagagataacgcctgcgcggatggtggcggttattgatgaaaataactgtattggctgcactaaatgtattcaggcgtgtccggtagacgccatcgttggcgctacccgtgccatgcatacggtaatgagtgatctctgtacgggctgcaatttatgtgttgatccgtgcccgacgcactgcatcagcttgcaaccggtcgcagaaacacctgactcctggaaatgggatctgaacaccattcccgtgcgtatcattcccgtggaacaccatgcttaagttattctctgcattcagaaaaaataaaatctgggatttcaacggcggcatccatccaccggagatgaaaacccagtccaacggtacacccctgcgccaggtacccctggcgcagcgttttgttattccactgaaacagcatattggcgctgaaggtgagttgtgcgttagcgtcggcgataaagtattgcgcggccagccgcttacccgtggtcgcggcaaaatgctgcctgttcacgcgcccaccagcggtaccgttacggctattgcgccccactctacggctcatcctagtgctttagctgaattaagcgtgattattgatgccgatggtgaagactgctggatcccgcgcgacggctgggccgattatcgcactcgcagtcgcgaagagttaatcgagcgcatacatcagtttggtgttgccgggctgggcggtgcaggattcccgacaggcgttaaattgcagggtggcggagataagattgaaacgttgattatcaacgcggctgagtgcgagccgtacattaccgccgatgaccgtttgatgcaggattgcgcggctcaggtcgtagagggtattcgcattcttgcgcatattctgcagccacgcgaaattcttatcggcattgaagataacaaaccgcaggcgatttccatgctgcgcgcggtgctggcggactctaacgatatttctctgcgggtgattccaaccaaatatccttctggcggtgctaaacaattaacctacattctgaccgggaagcaggttccacatggcgggcgtagttccgatatcggcgtattaatgcaaaacgtcggcactgcttatgcagtgaaacgtgccgttattgatggcgagccgattaccgagcgtgttgtaaccctgactggcgaagcaatcgctcgcccgggcaacgtctgggcacggctggggacgccagtgcgtcatttattgaatgatgccggattctgcccctctgccgatcaaatggtgattatgggtggcccgctaatgggctttaccttgccatggctggatgtcccggtcgtaaagattaccaactgtctgttggctccctctgccaatgaacttggcgaaccacaggaagaacaaagctgcatccggtgtagcgcctgtgctgacgcctgccctgcggatcttttgccgcaacagttgtactggttcagcaaaggtcagcaacacgataaagctaccacgcataacattgctgattgcattgaatgtggggcttgcgcgtgggtttgcccgagcaatattcccctggtgcaatatttccgtcaggaaaaagctgaaattgcggctattcgtcaggaagaaaagcgcgccgcagaagccaaagcgcgtttcgaagcgcgccaggctcgtctggagcgcgaaaaagcggctcgccttgaacgacataagagcgcagccgttcaacctgcagccaaagataaagatgcgattgctgccgctctggcgcgggtgaaagagaaacaggcccaggctacacagcctattgtgattaaagcgggcgaacgcccggataacagtgcaattattgcagcacgggaagcccgtaaagcgcaagccagagcgaaacaggcagaactgcagcaaactaacgacgcagcaaccgttgctgatccacgtaaaactgccgttgaagcagctatcgcccgcgccaaagcgcgcaagctggaacagcaacaggctaatgcggaaccagaacaacaggtcgatccgcgcaaagccgccgtcgaagccgctattgcccgtgccaaagcgcgcaagctggaacagcaacaggctaatgcggaaccagaagaacaggtcgatccgcgcaaagccgccgtcgaagccgctattgcccgtgccaaagcacgcaagctggaacagcaacaggctaatgccgagccagaacaacaggtcgatccgcgcaaagccgccgtcgaagccgctattgcccgagccaaagcgcgcaaacgggaacagcaaccggctaatgcggagccagaagaacaggttgatccgcgcaaagctgccgtcgaagcggctattgcacgcgccaaagcacgcaagctggaacagcaacaggctaatgcggtaccagaagaacaggttgatccgcgcaaagcggcagttgccgcggctattgcccgcgctcaggccaaaaaagccgcccagcagaaggttgtaaacgaggactaaatggtattcagaatagctagctccccttatacccataaccagcgccagacaagccgcattatgctgttggtgttgctcgcagccgtgccaggaatcgcagcgcaactgtggttttttggttggggtactctcgttcagatcctgttggcaagcgttagtgctctgttagccgaagctctcgtactcaaactacgcaagcagagcgtagccgcagcgttgaaagataacagtgcattgctgacaggcttattgctggcggtaagtattccccccctcgcgccatggtggatggtcgtgctgggtacggtgtttgcggtgatcatcgctaaacagttgtatggcggtctgggacaaaacccgtttaatccggcaatgattggttatgtggtcttactgatctccttccccgtgcagatgaccagctggttaccgccacatgaaattgcggtcaacatccctggttttatcgacgccatccaggttatttttagcggtcataccgccagtggtggtgatatgaacacactacgcttaggtattgatggcattagtcaggcgacaccgctggatacatttaaaacctctgtccgtgccggtcatagcgttgaacagattatgcaatatccgatctacagcggtattctggcgggcgctggttggcaatgggtaaatctcgcctggctggctggcggcgtatggttgctatggcagaaagcgattcgctggcatattcccctcagcttcttagtaacgctggcgttatgcgcaatgttgggctggttgttcagtccagaaacactggcagcaccgcaaattcatctgctgtctggagcgaccatgctcggcgcattctttattttgactgacccggttaccgcttctacgaccaatcgtggtcgtcttattttcggcgcgcttgcgggcttattagtctggttgatccgcagtttcggcggctatcctgacggcgtggcttttgccgtcctgctggcgaacatcacggttcctctgatcgattactacacgcgtccgcgcgtctacggccatcgcaaagggtaaaccatgctgaaaactatccgaaaacacggcattacgttggcgctatttgcagcgggtagtacagggttaactgcggccatcaaccagatgaccaaaacgacgattgctgaacaggccagtctgcaacaaaaggcgttatttgatcaggtgctgccagccgaacgctataacaatgcgctggcacagagttgctatctggtaactgcgccagagttaggtaaaggtgagcatcgggtttacatcgccaaacaggatgacaaaccggcagccgccgttctggaagcaaccgcgccagatggctattccggtgcgattcagctgctggtgggagccgattttaacggcacggtacttggcacgcgcgtgacagagcaccacgaaacgccagggcttggcgataaaatcgaactgcgcctttctgactggatcacccattttgcgggtaaaaaaatcagtggtgcagatgatgcgcactgggcggtgaagaaagatggtggtgatttcgaccagttcaccggcgcgacgattactccccgcgcggtggttaatgcggtaaaacgcgccggattgtacgctcagacgttaccggcacaactttctcaacttcctgcctgtggagaataaagcgtgagcgaaattaaagacgttattgttcaggggttgtggaaaaacaactctgcgctggtccagttgctcggcctttgtcctctgttggcggtcacgtccactgccactaacgctctgggtttaggacttgcgactacgctggtactgacgctgaccaacctgaccattagcacgctgcgtcactggacgccagccgagatccgcattcccatttacgtgatgatcatcgccagcgtggtcagcgctgtacagatgctgatcaacgcctacgcctttggcctgtatcaaagtttagggatttttattccgctgattgtcactaactgtatcgttgtgggccgcgctgaagccttcgccgccaaaaaaggtccggcgcttagcgcactggacggctttagtattggtatgggcgcaacctgcgccatgttcgtgctgggtagtctacgcgaaattatcggcaatggcacattgtttgacggtgcagatgcgctgttaggtagctgggcaaaagtattacgcgtggagattttccacaccgactcccctttcctgctggcgatgctgccaccaggtgcatttattggcctgggactgatgctggcaggaaaatacctgattgatgaaagaatgaaaaagcgccgtgctgaagcagctgcagaacgtgcattgccaaacggtgaaacagggaatgtctgatgaataaagcaaaacgcctggagatcctcactcgcctgcgtgagaacaatcctcatcccaccaccgagcttaatttcagtagcccttttgaattgctgattgccgtactgctttccgctcaggcgaccgatgtcagtgttaataaggcgacggcgaaactctacccggtggcgaatacgcctgcagcgatgcttgaactgggcgttgaaggggtgaaaacctatatcaaaacgattgggctttataacagcaaagcagaaaatatcatcaaaacctgccgtatcttgctggagcagcataatggcgaggttccggaagatcgtgctgcgcttgaagccctgcccggcgtaggtcgtaaaacagccaacgtcgtattaaacactgcattcggctggccgactattgctgtcgacacgcacattttccgcgtttgtaatcgtactcaatttgcgccggggaaaaacgtcgaacaggtagaagaaaagctactgaaagtggttccagcagagtttaaagtcgactgccaccattggttgatcctgcacgggcgttatacctgcattgcccgcaagccccgctgtggctcttgtattattgaagatctttgtgaatacaaagagaaagttgacatctgaagaaaaggggtaacaccgattaccccattgataacctttctttatcctcttttaaaacatctttttaacgtcaatgatgccattgcttagcgttatcatcaggtaatccgtttgcggataaccaaaaatgcaggttaattgtttttttaatagcgaaattttctattcattcgtgatcaagatcacgatgctgtcgcaatgtaaaaacattgcaagaatcaggttaaaatcatttaaatttacacacgcaacaaatattgacctacaaaacattacactggctatttttcagaaactggactatctcactagtaaaaacgctaaatagcagaacatatcgccgttaagccatcacccccctctcagtgcagtgaaaaaatctgccgttacgttttttgaaaaatttaacgctggataacatttcccggaatggttgaattccccgcctcagttatatgtaacagattattacaaaggacttgtctgaaagtgcaagatagtgaacattacctgccgtttcccctcccactataacaattgcgcgtatgttttttatacataacgcgagaaagcacccccgttaatatgggatgtaaaaaaagaggtaaaagtgtccactgcaaaccaaaaaccaactgaaagcgtcagtttgaacgctttcaaacaaccgaaggcgttctatctcatcttcagcattgagttatgggaacgttttggttattacggcctacaaggaattatggctgtttacctggttaaacaactgggtatgtctgaagcggatagtatcacccttttctcttcctttagtgccctggtttatggtctggtcgctatcggcggctggttaggtgacaaggtactgggtactaaacgcgtaattatgctcggcgctattgtgctggcgattggttatgctctggttgcctggtctggtcacgacgccggtatcgtttatatgggtatggcggctattgcggtcggtaacggcctgtttaaagctaacccgtcttctctgctttctacatgctatgagaaaaacgacccgcgtctggacggtgcattcaccatgtactacatgtccgtcaacatcggctctttcttctctatgattgctacgccgtggctggccgcgaaatacggctggagtgttgcgtttgcgttgagcgttgtaggcctgctgatcactatcgttaacttcgccttctgccaacgctgggttaaacagtacggtagtaaaccagacttcgagcctatcaactaccgtaacctgctgctgaccattattggtgttgtggcactgatcgctatcgccacctggctgctgcacaatcaggaagttgcgcgtatggcgctgggcgttgttgccttcggtatcgtggttatcttcggtaaagaagccttcgcgatgaaaggtgctgcgcgtcgtaaaatgatcgttgccttcatcctgatgctcgaagccattatcttcttcgtgctgtacagccagatgccaacgagtctgaacttctttgcgattcgtaacgttgagcactccattctgggtctggccgtagaacctgagcagtatcaggcactgaacccgttctggatcatcatcggtagtccgattctggccgctatctataacaagatgggcgataccctgccgatgccaaccaagtttgcaatcggcatggtgatgtgttctggtgcgttcctgattctgccgctgggtgcgaaattcgcgtctgacgctggtatcgtgtctgtaagctggctggtcgcaagctatggcctgcagagcatcggggaactgatgatctctggtctgggtctggcaatggttgctcaactcgttccgcagcgtctgatgggcttcattatgggtagctggttcctgaccactgccggtgcaaacctgattggtggttatgttgcgggtatgatggctgtgccggataacgttaccgatccgctgatgagtctggaagtctatggtcgcgtattcttgcagattggtgtcgctactgccgttattgcagtactgatgctgctgaccgcgccgaaactgcaccgcatgacgcaggatgacgctgcagacaaagcggcgaaagcagccgtagcgtaaaattcagggaaactcttttacaagccgctaacttttcgttagcggctttttttttgttcagcaacgcactaccatactttaaaccacagacaaaaggagttaccgatgaaattgttctacaaaccgggtgcctgctctctcgcttcccatatcaccctgcgtgagagcggaaaggattttaccctcgtcagtgtggatttaatgaaaaaacgtctcgaaaacggtgacgattactttgccgttaaccctaaggggcaggtgcctgcattgctgctggatgacggtactttgctgacggaaggcgtagcgattatgcagtatcttgccgacagcgtccccgaccgccagttgctggcaccggtaaacagtatttcccgctataaaaccatcgaatggctgaattacatcgccaccgagctgcataaaggtttcacacctctgtttcgccctgatacaccggaagagtacaaaccgacagttcgcgcgcagctggagaagaagctgcaatatgtgaacgaggcactgaaggatgagcactggatctgcgggcaaagatttacaattgctgatgcctatctgtttacggttctgcgctgggcatacgcggtgaaactgaatctggaagggttagagcacattgcagcatttatgcaacgtatggctgaacgtccggaagtacaagacgcgctgagtgcggaaggcttaaagtaatagccatcggcccacaggtcgttgtgggccgaaatgagatatttcagagctttgttgcgctgaagtaatgttctggtttggcaatacgatcctgagcagccaccacttgcagctcatattcctgcattgctttggtggtcaccatgatttcgtagactgcagcggtcacatgttccagcgcctcctgcagcgttgccccctgaagcagtttcaccagcagtaaaccgctcgtcacatcaccaacacctaccggctggcgcataccaaaatccaccagcggacggctgatatgccaggcttcatcggcggtgaccagcagcatttcaaaacggtcacggctgtagccagctcgcgccaggtgtttaaccaacacaatttgtggcccttgcgcaatgagttcgcgcgctgccagaaccgcttcttcgacgttatttaccgcatgctcacagagtatttccagctcaaccagatttggcgcaatgatatcgctggcaggcaaaccgtgccgcacatgaaactctgcgacacccggtgcaacgatacagcctttttccggatgacccattaccggatcgcaaaaatatttcgcctgcggattcgcggctttcacctgacggacgataccgaggatatgttcaccctgctccgcgcttcccagatagccacttaatacggcatcacaggtgtgtaatttatcaatggcggcaatgccttgcacaatttcggttaaatggctgggcggcatcacgcagccagtccatttgccgtattgggtgtgattagaaaattgaacggtgttcagcggccagacgttcgcgcccaggcggcgcatcggaaactctgccgcactgttacccgcatgaccataaacaacgtgagactggatagcgagaatatttttcatcatgttccctgtataaaaaccagggggagtgatttctcactccccctttccacttaatgcattatttccagcaaatcagacagtaattctttttaccgcgacgcagtaaggtaaaacgaccaaacagacgatcttcttctttaaagaagtattcaggatcggactgtttttcaccgttaatggtgatggcattggaggcgatagttttacgtgcctgaccacgggaaggttgcagttcagaatcgaccagtgcctgcatcaggtctgcgcccttttccatctcaaccatcggtacgccgtcctgcgccagctgttcgaagtccgcttcactcagcgcactcaaagaaccgctgaacaggcattcggtaatacgttttgccgcctgtaaaccttcttcaccgtgaaccagacgagtcacctgctccgccagtacatactgggcgcgcggtgctttaccgctgtttttatcttcttcttccagggcgttgatctcttcaatgctcataaaggtgaagaacttcaggaagcggtaaacgtcggcatccgcagtgttgatccagaactggtagaatttgtacgggctggttttcttcggatccaaccagactgcgccgccttcagttttaccaaatttggtgccatctgctttagtgatcagcggaacggtcaggccaaacacctgattctgatgcagacgacgggtcaggtcgataccagaagtgatgttaccccactggtcagaaccaccaatttgcagcaccacaccgtactgtttgttcagacaggcgaagtcataaccctgcaacaggttgtaggaaaactcagtgaagctaatcccctgatcttcacggttgagacgctgcttaaccgcttctttgttgatcatctggttaacggagaagtgtttgccaatatcgcgcaggaaggtcagcacattcatattgccgaaccagtcatagttgttcgccgcgatagcagagttttctccacagtcgaaatcgaggaacggggcaacctgcttacggattttgtccacccactcctgaacagtttcttcggtgttcagcttacgctcggcagctttgaagctcgggtcgccaatcagacccgtcgcgccgcctaccagcgcaaccggcttgtggcccgcctgctggaagcgtttcaggcataacaatggaacaagatgccccaaatgcaagctgtcagcggtaggatcgaagccgcaatagagcgcgatcgggccttgcgccagtcgctctgctaacgcttcctcgtccgtcacctgggctaccagcccccgctcttgcaattgtttaatcaagttactgcttgccatcaaaatctccatgtatataacgactgcacctttgccggtacacgacttttcgccagatgcgaaagagacatagaataaagtgccagaatcaggagtaccagcgattaaagcaagatttttgcatcttttcagggtgcaagacgatcaatcttccacgcatcattttcacgctggtacaaaaagcggtcatgcaggcgatgctcaccaccctgccagaactcaatctgttcaaggctgacgcgaaaaccgccccaaaagctcggcaatggcacttcgccctgttgaaacttctgcttcagctccaggaatttactttcaaggataccgcgggcagaaatgcgactggactgcttgctaacccatgcaccaatctggctatcacgcgggcggctatgaaaatatttcatcacttcgagagtgctaagtcgttctgctttaccgatcaccatcacctggcgctcaagggtatgccacgggaacagcaggctaacgcgcggattattttcgatttgatgtgctttacggctgccgaggttggtgtaaaacaccatgcctttttcgtcgtaatgtttgagtaaaacgatgcgctgataaggctgaccatgttcatccacggtagcgaccaccatcgcggtagggtccgccagtttggcttcacaagcctgagagagccaacgttcaaaaagggttaatggatcggcgggaagatcgcggcggcgtaacccgcctttggtgtattcacggcgcagatgcgcgatttgctgcaattcgtcgttatcagacatggttttctttacggattgtcagtgggtgacgctattgtgcgccgcccctggaaaaatctcaacgctgtggattttgtaactgacagttattcaagacgatgcggtcgcgtttatagacagtcgcttcatcgcctttgctccagaaaacatagattccgtcagtgtaacgcgcgccagaggcactaatgccctgtttgagatgcagtagttgattatcgtaaacaaaactgacctcctggcgcggattattcagtttgaccgtcaacggtttttcatcacactggtattccagcgtatcggtttgcatgcgctcaaccagctgattaaaggcgctacagccggagagaaggaccggcaaaatgataattaacagttttttcatagtcatatcccgaagactttcctggtctggagggcaatacgccctccctaacgttccaagtgtaacggcagacgcggtaagaaaaattcagttaactctgatatcacgggttagcggggaaaatagcccccagtaccgtctcctggcttgcgccagtgacggaaggcagatttcctggtaatcccgccagcgtccgccaggcaagccaggcgaaagccaatgcttccatgtcatcgccactaatgccaacggcatcggtggtggtgacttctgtgcctggcagtaatgccgccagacgcgccatgagtagcggattacgactacctccaccacataccatcaatcgttcgcagccaccgctcaacaaaacttgttcagaaatggtcacggcggtgagttctgccagtgtcgcctgcacatctcggggatcaacacccggaaaatggcgcaaatggcgctccagccaaccatagttaaagtattcgcgtccggtgcttttcggtgcaggttggctgaaatacgggtcgctgagcatattttgcagcagtgggagaataactttacccgcccgtgcccactcggcatctttatcgtaaggtttaccggcctgacgccagatccaggcatccatcagcatgttaccaggaccggtatcgtagcccccaaccggctgcccaggaatgagcagactcagattggcgatgccgccaatattgagcaccattcgtcgctcggttgggtgagccagcagcgcatgatggaacgcaggtaccagcggtgcgccttgtcctcccaaggcaatatcgcgacggcgaaaatcaccgacaaccgtaattccggtgcgtgccacaatttgattgttatcgccaatctgtaaagtgtgtggtgccacgcccgtcggttcatgccagacggtttgaccgtgacaaccgatcgcaactatatctcttgcctgcagattttgttccttaagcaaggcattgaccgcatcagcaaaaagttgcccgagttgagtatcaagctgtccaaactggctaagtgtaagctgctggccctggcaaatatccagtacagcctgtttcagagataccgggatcggccaactcaaacttgccagctgtgcgacccggtgttcatcaattgtcgccaacacaacatcaacaccatcaaggctggtgccactcataacgccaataaagcggccgcttttcatagttcatcctttttcaatctgacgtttgcgcaccactcaaacataaacttttcgtgaataccatgcggaatgaccgatttttaccgttggtagtaaaacattatcttcaaatcaataatcatcatgaatgttttgtttataattggttgatcctactttcattatgatttgctcatatttggtagaacatgtaaccatggattcacatatgccatatactttgaccatgagggatgcttgcgtggcgtttcatggtgaacaggagatttttcaatgattaaacgcgtattggttgttagtatggtaggtctgtctcttgtcggttgtgttaataacgacaccctgagtggggatgtttataccgcttctgaagcgaaacaagtacagaatgtcagctatggcaccatcgttaacgtacgtccggtacagattcagggcggtgatgattccaacgttatcggtgcaattggcggtgctgttcttggtggtttcctggggaatactgttggtggcggaaccgggcgttctctggctactgcagcaggcgctgttgcaggtggcgtagctggtcagggcgtacagagtgcaatgaacaaaacgcagggtgtcgagctggaaattcgtaaagacgatggtaataccatcatggtggtacagaaacaaggcaacactcgtttctctccgggccaacgtgtcgtactggccagcaatggcagtcaggtgaccgtttctccgcgctaaataagtttgcgtgtggtcaggttactgaccacacgcccccttcatttcaccctttggcctgtaactcaatgatattatgctcaagttttgcgatgagcgtaatcagttgctccagttcctctgcggagatgccatgtaatatttccgcgcgggttttgttaataacagcttccatttcgctgatcagcggctctgccttttccgtcagtttaatacgtttagcccgacgatcgctggcacaagtttgacggctaattaaccctttttcttccagttggtccagagtacggaccagacttggctgctcgatgccaatcgcttttgccagttgaatttggctctggtctggaggtaactgatggatattgtgtaacgtaacccaatgggtttgtgttaactccagcggtttcaggcgatggtctatcagagcacgccatatgcgcaccaaccgtgccagatcagaacctagtgggctttccaatttcatctccttataattagcttgctaagatattatgcggcttttagaatagtgtgcagcaattgtattgctaaaacaaatgtattgctgcatttggttaccgtcagacatatttttcagaaattgcgcgtaaatttttcgcacttaaagaatatttattaatctaacgcaatatattcggtcgtaaaggaatctactttgtgaagtttatgctcaatgcaacaggattgcccttacaagatctggtgttcggtgcgtccgtctactttcctccgtttttcaaagcattcgcgtttggattcgtcatctggcttgtcgtacaccgcctgcttcgtggctggatctacgccggtgacatctggcatcccttgttaatggatttaagcctgtttgcgatttgcgtttgccttgctctggcaatactgattgcgtggtaactatgagtattaaaacaattaagtatttcagtacaatcattgtagcggtagttgcggttcttgccggatggtggctgtggaattattacatgcaatctccgtggacacgcgacgggaaaatacgcgcagaacaggtttctatcaccccacaggtgagcggacgtattgttgagctgaatataaaagacaaccagctggttaacgcgggggatcttctgctcacgatcgataaaacgccctttcagatcgccgagctgaacgcacaggctcagctggcgaaagcgcaatctgacctcgcaaaagccaataacgaagcgaatcgtcgtcgtcatctcagtcaaaattttatttctgccgaagaactcgataccgctaacctcaatgttaaagcgatgcaggccagtgttgatgccgcacaggcgacgctgaaacaggcacaatggcaactggcgcaaacggaaattcgcgccccggtgagtggatgggtgactaaccttactacccgcatcggcgattacgctgataccgggaaaccgctgtttgcccttgtcgacagccacagcttttacgtcattggttattttgaagaaaccaagttgcgccatatccgcgaaggtgcaccagcacaaattaccctctatagtgataacaaaacgttacagggtcacgtttccagtatcggtcgggcgatttatgatcagagcgttgaaagtgacagtagccttattccggatgttaaacctaacgtcccctgggttcgactcgcccaacgcgttcccgtccgctttgcgctggataaagtcccaggcgatgtcacgttggtgagcggcaccacctgtagcattgccgtaggtcaataatgaacgcaagcagttggtccttgcgcaatttgccctggttcagggccacgctggcgcaatggcgttatgcgttacgcaataccattgccatgtgtctggcgctgacggttgcctattatttaaatctggatgaaccctattgggcgatgaccagcgctgcagtggttagctttcccaccgttggcggtgttatcagcaaaagcctcggacgcatcgctggcagtttgctcggagccattgcggcactgcttcttgccgggcatacgctcaatgagccgtggttttttctattgagcatgagcgcgtggcttggcttttgtacctgggcctgtgcgcacttcacgaataacgtcgcgtatgcatttcaactggcgggctacacggctgccatcatcgcctttccgatggttaatattactgaggccagccagctgtgggatatcgctcaggcgcgcgtttgcgaggtaatagtcggtattttgtgcggcggcatgatgatgatgatcctgccgagcagttccgatgctactgcccttttaaccgcattgaaaaacatgcacgcccgattactggaacatgccagtttactctggcagcctgaaacaaccgatgccattcgtgcagcacatgaaggggtgattgggcagatactgaccatgaatttgctgcgtatccaggctttctggagccactatcgttttcgccagcaaaacgcgcgccttaatgcgctgctccaccagcaattacgtatgaccagtgtcatctccagcctgcgacgtatgttgctcaactggcccagtccgccaggtgccacacgagaaattctcgaacagttgctgacggcgctcgccagtagccaaacagatgtttacaccgtcgcacgtattatcgccccgctacgcccgaccaacgtcgccgactatcggcacgtcgccttctggcagcgactacgttatttttgccgcctttatctgcaaagtagtcaggaattacatcgtctgcaaagcggtgtagatgatcataccagactcccacggacatccggcctggctcgtcataccgataacgccgaagctatgtggagcgggctgcgtacattttgtacgttgatgatgattggcgcatggagtattgctagccaatgggatgccggtgccaatgcattaacgctggcagcaattagctgcgtactctactccgccgtcgcagcaccgtttaagagcttgagtcttctgatgcgcacgctggtgttacttagcctattcagctttgtggtcaaatttggtctgatggtccagattagcgatctgtggcaatttttactgtttctctttccactgctggcgacaatgcagcttcttaaattgcagatgccaaaatttgccgcattgtgggggcaactgattgtttttatgggttcttttatcgctgtcactaatcccccggtgtatgattttgctgattttcttaacgataatctggcaaaaatcgttggcgtcgcgttggcgtggttagcgttcgccattctgcgtccaggaagcgatgctcgtaaaagccgccgccatattcgcgcgctgcgccgggattttgtcgatcagctaagccgccatccaacactgagtgaaagcgaatttgaaagcctcacttatcatcacgtcagtcagttgagtaacagccaggatgcgctggctcgccgttggttattacgctggggtgtagtgctgctgaactgttctcatgttgtctggcaattgcgcgactgggaaagccgttccgatccgttaagccgagtacgggataactgtattagtctgttgcggggagtgatgagtgagcgtggcgttcagcaaaaaagtctggcggccacacttgaagaattacagcggatttgcgacagccttgcccgtcatcatcaacctgccgcccgtgagctggcggcaattgtctggcggctgtactgcagccttagccaacttgagcaagcaccaccgcaaggtacgctggcctcttaattacttaattacaccacaggcatagcgttcaccgccaccgcccagcggtttaggttgatcggacatattatcgccgccaacgtggaccatcagcgctttgtctttgatttcatccagacttttcagacgaggcgcgatgacggcatcggtagctttgccgtcattattgacgaccagtgcaggcagatcgcctaaatgcccggcaccttctggcccttcatgtttaccggtattttgtggatcaagatgcccgcctgcggattccgcggcgctggctttgccatctttggtggctggctggcagcttcctttggcatgaatatggaagccatgttcaccggggggtaatgctttcagatcggggctaaactccagacctttatcggtttcagtaatggtgacgctaccaatactctgccctaccccttggctcgtgacgaggttcatctcgactttttcactggcagcttgtgcgccggttgcaacaaccagcgccagaatagccagactaaaacgtttcataggacctccgttcattgtgcattcctgaataagtgtaaaccagtgacacatttttgaacggcggctattcctaaaagtgcttacggtacgtcgtaccccagtgccgctttacggatacgaaaccattgttgacgggtcattttcagtgtttctgcttcgacagctgcccgtacgcgctcaattttaccactaccgataattggcagcggctggcttggtaaacgtaatacccaggcgtaaaccacctgttcaatgctgcccgcgtttaactcctctgccaccacagccagttcatcacgcagcggctggaaataatcatcattaaacagacgaccaccaccaaggcaggaccacgccatcggacgaacacgcagttgttgtagttggtcgagcgtgccatccagcagtaacggctgatgcaccggggatatttccacctgattagtggcaagggtaaacggcagacgactttgcaacagggcaaattgcgcaggcgtaaagttgcttacgccaaaatgacgcactttgccgctctgatgcagatgtttgaacgcgtccgccacttcatcggcatccattaacgggtctggtcggtggattaacagcaaatccagatgatcggtcgcgagattaattaggctctgttcggcgctcttaatgatgtgatcgcggtcagtgatgtaatgaccaatgacgttttcttcacgcgcggtcgtcgcgataccgcatttactgacgatttccatccgttcacgcaggtgaggtgccagtttcagtgcctcgccaaacgccgcttcgcactgatagccaccataaatatcagcatggtccacggtggtcacgccgagatccagatgctcttcaataaaactgaccagctggcgggcggacatattccagtccatcaatcgccagtagcccatcacaaaacgggaaaactccgggccttgcggcgcaatagtaatacgctgaaccataatcgcttcctcttatcagatatgagaggagtatacgcaagattaggttcaaaagagacttggttgctccggttcgtcactactcgctggcttatttgcgcgtaatttgcgcattaatcgctgccgacaaaggcgcagcacctcttgtttttcgccatcgctcattttattccagttaaaacgctcatcacgactacgaaaacagccgcgacaaaacccgcgttcgtcagactggcaaattccccggcacgggctctggacgggaaagaactctaattgctccgccacttcgccctcctcagataagattattaccattattgaagctgttaatgtccaaagtagcaactttgcttgcactagaccgactggtctactacactccaacgcatgaacaaacacaccgaacatgatactcgcgaacatctcctggcgacgggcgagcaactttgcctgcaacgtggattcaccgggatggggctaagcgaattactaaaaaccgctgaagtgccgaaagggtccttctatcactactttcgctctaaagaagcgtttggcgttgccatgcttgagcgtcattacgccgcatatcaccagcgactgactgagttgctgcaatccggcgaaggtaactaccgcgaccgcatactggcttattaccagcaaacactgaaccagttttgccaacatggaaccatcagtggttgcctgacagtaaaactctctgccgaagtgtgcgatctgagtgaagatatgcgcagcgcgatggataaaggtgctcgcggcgtgatcgccctgctctctcaggcgctggaaaatggccgtgagaaccattgtttaaccttttgtggcgaaccgctgcaacaggcacaagtgctttacgcactgtggcttggcgcgaatctgcaggccaaaattagccgcagtttcgagccactggaaaacgcgctggcccatgtaaaaaacattattgcgacgcctgccgtttaacaggcattttttatcaccagacgaccgggagcctttatgagttctgaaaaactgtattccccactgaaagtgggcgcgatcacggcggcaaaccgtatttttatggcaccgctgacgcgtctgcgcagtattgaaccgggtgacattcctaccccgttgatggcggaatactatcgccaacgtgccagtgccggtttgattattagtgaagccacgcaaatttctgcccaggcaaaaggatatgcaggtgcgcctggcatccatagtccggagcaaattgccgcatggaaaaaaatcaccgctggcgttcatgctgaaaatggtcatatggccgtgcagctgtggcacaccggacgcatttctcacgccagcctgcaacctggcggtcaggcaccggtagcgcctagtgcacttagcgcgggaacacgtacttctctgcgcgatgaaaatggtcaggcgatccgtgttgaaacatccatgccgcgtgcgcttgaactggaagagattccaggtatcgtcaatgatttccgtcaggccattgctaacgcgcgtgaagccggttttgatctggtagagctccactctgctcacggttatttgctgcatcagttcctttctccttctagtaaccatcgtaccgatcagtacggcggcagcgtggaaaatcgcgcacgtttggtactggaagtggtcgatgccgggattgaagaatggggtgccgatcgcattggcattcgcgttagtccaatcggtactttccagaacacagataacggcccgaatgaagaagccgatgcactgtatctgattgaacaactgggtaaacgcggcattgcttatctgcatatgagtgaaccagattgggcggggggtgaaccgtatactgatgcgttccgcgaaaaagtacgcgcccgtttccacggtccgattatcggcgcaggtgcatacacagtagaaaaagctgaaacgctgatcggcaaagggttaattgatgcggtggcatttggtcgtgactggattgcgaacccggatctggtcgcccgcttgcagcgcaaagctgagcttaacccacagcgtgccgaaagtttctacggtggcggcgcggaaggctataccgattacccgacgttgtaatccaacattgcgagcggcgtaaagccgccgctatactaaaacaacattttgaatctgttagccattttgaggataaaaagatgcgtcttcttcataccatgctgcgcgttggcgatttgcaacgctccatcgatttttataccaaagtgctgggcatgaaactgctgcgtaccagcgaaaacccggaatacaaatacagtctggcgtttgttggctacggcccggaaaccgaagaagcggtgattgaactgacctacaactggggcgtggataaatacgaactcggcactgcttatggtcacatcgcgcttagcgtagataacgccgctgaagcgtgcgaaaaaatccgtcaaaacgggggtaacgtgacccgtgaagcgggtccggtaaaaggcggtactacggttatcgcgtttgtggaagatccggacggttacaaaattgagttaatcgaagagaaagacgccggtcgcggtctgggcaactaatctcctgccgggcgtgaactcatcgcgcccgcatctttactgcatcgacaagtaatatttgtcataatgcgcgctgcaatttatccgtattaagagaatcagatgtccgataacgctcaacttaccggtctgtgcgaccgttttcgtggtttttatcctgttgtgatcgatgttgaaacagccggatttaacgccaaaaccgatgcgctgcttgagattgccgccatcaccctgaaaatggatgaacaaggctggctgatgccggacaccacattacatttccacgtcgaaccatttgtcggcgcaaatttgcaaccagaagccctcgccttcaacggcattgacccgaacgatcccgatcgcggcgcggtcagcgaatacgaggcgctgcacgaaatttttaaagttgtacgtaaaggtattaaagcgagcggctgtaaccgcgccattatggtggcgcacaatgccaattttgatcacagctttatgatggccgccgcagaacgcgccagtctgaaacgtaacccgttccaccctttcgccacttttgacactgctgcactggccgggctggcactcggacaaaccgtattgagtaaggcttgccagaccgctggcatggacttcgacagcacccaggcgcactccgcgctgtacgacaccgaacgcactgctgtgctgttttgtgaaatcgtcaaccgctggaaacgtctgggaggctggccgctatctgccgccgaagaggtgtaatcgagtcgatgcctgatgacatgcaatgattcaggcatctatagtgaggctattccacgcatcctgcatgatattcacggggaatagcgttaatggcagataatccagaccctagtagcctcctgccggacgtgtttagtccggcgacccgcgactggtttcttcgcgcctttaaacagccgaccgctgtccagccgcaaacctggcatgtggcggcgcgaagcgaacatgcgctggtgattgcaccgaccggctccgggaaaacgctggcagcatttctctacgccctcgatcggctcttccgcgaaggcggcgaagatacccgcgaggcgcataagcgtaaaaccagtcgcatcctctatattagtccgataaaagccctgggcaccgacgttcagcgcaacttgcagatcccgttgaagggtattgccgatgaacggcggcggcgcggcgaaacggaagtcaatcttcgcgtagggatccgtactggcgatacgcctgcacaggaacgcagcaaactcacccgtaatccgccggatattctgatcaccacacccgaaagtctctatctgatgctgacctcccgcgcgcgcgaaacgctacgcggcgtcgaaacggtaattattgatgaagtccacgcggtagcgggcagtaaacgtggtgcgcatctggcgttaagtctggagcggctcgatgcgctgctccacaccagtgcacagcgaattggcctttctgccactgtgcgcagtgccagcgatgtggcagcatttcttggtggcgatcgcccggttacggtagtcaacccgcccgcaatgcgccatccgcagatacgaattgtcgtaccggtcgccaatatggatgatgtcagtagcgtcgccagcggcaccggcgaagacagccatgccggccgggaaggctccatctggccatatattgaaacgggtatccttgatgaagtgttgcgccatcgcagcaccattgtctttactaatagccgggggctggcggaaaaactgacggcacgattaaatgagctttacgccgcacgcttacagcgttccccgtctatcgccgttgatgcggcccatttcgagagcacctccggcgcaacctctaaccgtgtacaaagtagcgacgtttttattgcccgcagtcaccacggctccgtctctaaagaacaacgagcaatcaccgaacaggcgctgaaaagcggtgaattacgctgcgtggtcgcaacctccagtcttgaactggggattgatatgggcgcggtggatctggtgattcaggtggcaacgccgctttctgttgccagtgggttacaacgcattggtcgcgccggacatcaggttggcggtgtatctaaagggctgtttttcccccgtacccggcgtgatttagtcgattccgcagtcattgtagagtgtatgttcgcaggcaggctggaaaacctgacaccaccgcataatcctctcgacgtccttgcgcagcaaaccgttgccgccgcggcgatggatgcattacaggtagacgaatggtactcccgcgtacgccgtgccgcaccgtggaaagatctgccaagacgtgtttttgacgccacgctggatatgctttccgggcgctatccctctggcgatttttctgcttttcgccccaaactggtctggaacagggagaccgggatattgaccgcccgacctggcgctcaattgttggcggttaccagcggcggcaccattccggatcgtggcatgtatagcgtgttattacccgaaggtgaagaaaaggccggtagccggcgggtgggtgaactggatgaggagatggtatatgagagccgggtgaacgacattatcactctcggcgctaccagttggcggatccagcaaatcacccgcgatcaggtgattgtgactcctgctccgggtcgttctgcccggctccccttctggcgtggtgaaggtaacggacgtccggctgaattaggcgagatgatcggcgattttcttcatttgctggcggatggcgcgttcttttccgggactattcccccgtggctggcagaagaaaatacgatcgccaatattcaggggttgattgaggagcagcgcaacgcgacgggcatcgttccggggagtcgccatctggtcctcgaacggtgccgtgatgaaattggtgactggcgtattattttgcactctccctatggaagacgggtgcatgaaccctgggcggtggcgattgccgggcgaatacatgcgctatggggcgctgacgcgagcgtggtcgccagtgatgacggcattgttgcacgtattcctgacaccgatggtaaattgcccgatgccgcgatttttttgtttgaaccagaaaagttgctgcaaattgtccgcgaggcggtaggcagcagcgcacttttcgccgcccgttttcgcgaatgcgccgcgcgggcattattaatgccggggcgcactccgggccatcgcaccccgctttggcaacaacggctgcgcgccagtcagttgctggaaatcgctcagggatatccggattttccggtcattctcgaaaccctacgcgaatgtctgcaagatgtttatgatcttcccgcactggaacgtttgatgcgtcgcctgaacggtggcgaaattcaaatatccgatgtaacgaccactacgcccagccctttcgccacaagtttattgttcggctatgtcgcggaatttatgtaccagagcgacgccccgctggcagagcgccgggcatccgtactgagcctggacagcgagttactgcgcaatctactcggacaggtcgatccgggggaattactcgacccgcaggtcattcgccaggtggaagaagagttgcaacgactggctcctggcagaagagcgaaaggtgaagaaggattgttcgacctgctgcgcgaactggggccaatgaccgttgaagacctggcgcaacggcatacaggcagcagtgaagaggttgcgagctatctggaaaatcttcttgcagtaaaacgaatcttcccagcgatgattagcggacaggagcgtcttgcctgtatggatgatgccgccaggctgcgtgatgccctcggcgtacgactaccagagagtttgccagagatttatttacatagagtcagttacccgcttcgcgacctctttctgcgctatctccgggctcatgctctggtcacggctgaacaactggctcatgagtttagtctcggtattgccattgtcgaagagcagcttcagcaactgcgtgaacagggtctggtgatgaatctgcaacaagacatctgggtgagcgatgaagtatttcgtcgtctgcgtttgcgcagcctgcaagccgccagagaagcgacgcgtcccgttgcagccacgacctatgcgcgattgctgctggaacgtcagggcgtattacccgccaccgatggtagcccggcgctctttgccagtacaagcccaggcgtttatgagggcgtagatggcgtgatgcgggtgatcgaacagcttgccggagtcggtttacccgccagtctctgggaaagccagatcctgcctgcccgcgtacgcgactatagcagtgaaatgctcgatgaattactggcaaccggtgcggttatctggagcgggcaaaaaaaactgggtgaagatgacggcctggtggcactgcatctacaggaatatgctgcagaaagcttcactcccgccgaagcggatcaggcgaatcgtagcgcgctgcaacaagcgatagtcgctgttctggctgacggaggagcctggtttgcacaacaaatcagccaacggatacgcgacaaaatcggcgaaagcgttgatctctctgccctgcaagaggcgttatgggcgctggtctggcaaggcgtcatcaccagcgacatttgggcaccgttacgcgccctcacccgcagcagttccaacgcacgcaccagtactcgccgcagtcaccgggctcgtcgtggacgtcctgtctatgcgcaacccgtcagcccgcgggtatcttacaacacaccaaatctggctggacgctggagcttattgcaggtggagccactaaacgataccgaaaggatgctggcgctggcggaaaatatgctcgaccgctacggcatcatcagtcgtcaggcggtgatagccgaaaatatccctggcgggtttccaagcatgcaaacgctttgtcgaagtatggaagactccgggcgaattatgcgaggtcgttttgtagaaggtctgggtggcgcgcaattcgctgaacgtctgactattgaccgattgcgcgatctggcgacacaagccacgcaaacgcgccactatacaccagtggcgctctctgccaacgatccggctaatgtgtggggaaatcttctgccctggcctgcacatccggcaacgctggttccaacgcgtcgggcgggtgcgctggtggtcgtttctggcggcaaattgttactctatctggcgcaaggtggcaaaaaaatgctggtctggcaggaaaaagaggaattactcgccccagaggttttccacgcgctgactaccgcactgcgtcgcgaaccacggctgcgctttacgctaacagaagtgaatgatctaccggtccggcaaacgccgatgtttacgctgctgcgtgaggcgggatttagtagtagcccacaagggctggattggggataaagaaaggactgacggatgcccgttcgcatccgtcagtattgcaggacggattattccgcgtccggctcttcagacttgtatttagcggcagtttctttgatcagctgctgcagttcgccacgctgatacatttcgatcacgatatcacaaccgccgaccagctcgccgtcaacccacagttgcgggaaggtcggccagttagcatatttcggcagttccgcacgaatgtccggattctgcagaatatcaacataggcaaaacgttcgccacatgcggcaagcgcctggactgcctgggcagagaaaccgcagctcggcagtttcggactacctttcatgtacagcaggatcgggttttcagcaatctggcgttggattttttcgatagtggtgctcattgtcttgcttcctcaaacttctttacggcagtaatctgacattgtagcgggtcagtgcggcatcggaaaataacattttcatcacgcttttgctattttatccctttgctctatttgttgcatttcaaatattcgtttcttctctgatgccggcaaactggcgtatttataaccatttttagctttcactgctgcatttttttgcgctcgccaacgaaacgtattttttaacaataaaagctattaactttctcttcttctatgcattagaatcatcaagttttgtaaatcagacgcaggcatgatagacctgcctttacagagggacgctcagtggcgcggataaaccgtattagcatcacgctctgtgctttactttttaccaccctgcctttaacgcctatggcccatgctagtaagcaagccagggagagttctgctaccactcatatcaccaaaaaagcagataaaaagaaaagcacggcaaccaccaaaaagacccagaaaacagcgaaaaaagccgccagtaaaagtacgaccaaaagcaaaaccgcttcttccgttaaaaaatcttccattaccgcttctaaaaacgccaaaactcgcagcaaacacgccgtcaataaaacggccagtgccagctttaccgaaaagtgtaccaaacgtaagggctataaaagccattgtgtgaaagtcaaaaatgccgcgagtggaactcttgccgacgcgcacaaagcgaaggtgcaaaaagctacgaaagtggcaatgaataaactgatgcagcaaattggtaagccatatcgttggggtggcagcagtccgcgtaccggttttgattgcagcggcctggtttattacgcttataaagatttggtgaaaattcgtattccgcgtacggcgaatgaaatgtatcacctgcgtgatgcagcgccaatcgaacgtagtgaactgaaaaacggcgacctggtctttttccgtactcagggacgcggcacagccgatcatgtcggcgtgtatgtcggcaacggcaaatttattcagagtccgcgcacaggtcaggaaattcaaatcacttctctcagtgaagactactggcagcgccactatgttggcgctcgtcgggtaatgaccccaaaaacacttcgctaaaactttaccctgttgttacggcaacagggtaagttcatcttttgtctcaccttttaatttgctaccctatccatacgcacaataaggctattgtacgtatgcaaattaataataaaggagagtagcaatgagtttcgaattacctgcactaccatatgctaaagatgctctggcaccgcacatttctgcggaaaccatcgagtatcactacggcaagcaccatcagacttatgtcactaacctgaacaacctgattaaaggtaccgcgtttgaaggtaaaagtctggaagagattattcgcagctctgaaggtggcgtattcaacaacgcagctcaggtctggaaccatactttctactggaactgcctggcaccgaacgccggtggcgaaccgactggaaaagtcgctgaagctatcgccgcatcttttggcagctttgccgatttcaaagcgcagtttactgatgcagcgatcaaaaactttggttctggctggacctggctggtgaaaaacagcgatggcaaactggctatcgttagtacctctaacgcgggtactccgctgaccaccgatgcgactccgctgctgaccgttgatgtctgggaacacgcttattacatcgactatcgcaatgcacgtcctggctatctggagcacttctgggcgctggtgaactgggaattcgtagcgaaaaatctcgctgcataataactgatggcaaatgcagcattgcctgaagcgctacgcttatcaggcctacgcggatcatcgatgtaggtcggataaggcactcgccgcatccggcaagataaatcgcacgttgtcagcaactgtaacgcagaaggttatccttctgcgtttttgtttaattagctgttagcaacgcaaactgtttcaggttgttttctggcactcataaacaccagcaataatgccagtcccgcgacaatcgctcccatcaccggcacaaagctgtatcccagcccagcggaaattaccgcaccaccagcagctgctcccagcgcatttccaagattaaaggcaccaatattgacactactagacagacctggcgcttcactggcgacacgcatcacgcgcatctgtaacggcggtacgaccgcaaaggttgctgcgccccacaccaccatgctaatagctgcgccgaactcattgcgggccaggaacgggattgccagcataatcaccatcaacaacaacaaaaagcctttcaacgtgccgttaacactacgatctgccagtttgccgccgagatagttaccgatagagaatccgacaccaatcagcaccagcattgccgtgacgaacaccggtgttgcgtgggtaatactttgcagtaccggagagatataggtgtagagagtaaacattgcaccagctcccagtaccgtcgtcagcaatgcagacagcacctgcggacgcattaataccgccagctcttttttcacttcaggtcgtgcccctgcaccacctttaggtaaactgaagaacagacttaccatactaatcactcccagccccgccgttgccagaaaactcatccgccagccgatggtttcacccaaccaggtcgccgccggcacgccaccgatatttgccagggttaaccccataaacatagtggcaactgcgctggcctgtttatgttttggcaccacgcttgcggccacgacactacccaaaccaaaaaatgctccgtgattcaggctggtcaaaatgcgactaagcatcagggtcatataatccggcgcgatggcggaaagtacgttgccgagcgtgaaaattgccatcaggaaaatcaacgcactgcggcgggcacgatgagaaagtagaagcgtcatcagcggcgcgccaaccattacgccaactgcataggcactgattaacattccggcagcgggaatgctgacatccacaccgcgcgcaatgacgggcaacaagcccattgggctgaactccgttgtcccgataccaaacgcgccaatcgccagcgccagcaacggatagttaattttcatgccttatctccacctcttcgcgtcattacgcgatattcattaaagtggcgaaagcatgacagcaatcacaaaaaaatgaaaataacaaaaagagaaaacacttttgccattttgctaacaaacaggaaggagatgcgagggagaacgcgctccctcgagaggaaatcagtgcagcgcggcagtcaaacccacggctacgatcaaaccgaggacgataatcgttgttaccagtgaaaatttaaggtcggtgctcatcaagttttctccttttttattaccacacaaaaagtgatattacgcatttttacacactgtgatgaaaaaatctcccgtcatttataatgataagtgtttttaccacttccccttttcgtcaagatcggccaaaattccacgcttacactatttgcgtactggccattgaccccttcctgacgctccgtgtcgtttttccggcgtaccgcaacacttttgttgtgcgtaaggtgtgtaaaggcaaacgtttaccttgcgattttgcaggagctgaagttagggtctggagtgaaatggaatggcaacaataaaagatgtagcgaaacgagcaaacgtttccactacaactgtgagtcacgtgatcaacaaaacacgtttcgtcgctgaagaaacgcgcaacgccgtgtgggcagcgattaaagaattacactactcccctagcgcggtggcgcgtagcctgaaggttaaccacaccaagtctatcggtttgctggcgaccagcagcgaagcggcctattttgccgagatcattgaagcagttgaaaaaaattgcttccagaaaggttacaccctgattctgggcaatgcgtggaacaatcttgagaaacagcgggcttatctgagcatgatggcgcaaaaacgcgtcgatggtctgctggtgatgtgttctgagtacccagagccgttgctggcgatgctggaagagtatcgccatatcccaatggtggtcatggactggggtgaagcaaaagctgacttcaccgatgcggtcattgataacgcgttcgaaggcggctacatggccgggcgttatctgattgaacgcggtcaccgcgaaatcggcgtcatccccggcccgctggaacgtaacaccggcgcaggccgccttgccggttttatgaaggcgatggaagaagcgatgatcaaggtgccggaaagctggattgtgcagggtgactttgaacctgaatccggttatcgcgccatgcagcaaatcctgagccagccgcatcgccctactgccgtcttctgtggtggcgatatcatggcaatgggcgcactttgtgctgctgatgaaatgggcctgcgcgtcccgcaggatgttagcctgatcggttatgataacgtgcgcaacgcgcgctattttacgccggcgctgaccacgatccatcagccaaaagatagcctgggtgaaacagcgttcaacatgctgttggatcgtatcgtcaacaaacgtgaagaaccgcagtctattgaagtgcatccgcgcttgattgaacgccgctccgtggctgacggcccgttccgcgactatcgtcgttaatcacccgttgcgggagtctcttccggctcccgcagccactccttattcagcgtctcactatcgccgagatactcaagcaaccaggttaacgcagggctcatatcattttgctgccatgtcagacaacatgcgctatccggaaaggggttttccagttctaatgctacccacttcccctcattaagccacggtttggcgaaatgtgttggcaccatccctatgcataatcctgcgctgatacaggttgcgctactttcccagtcaggcacgacaactcttttttggttatccagcaaccaggtaatacgtttaggtagcgttcggctggtgtcttcgcgcaccaagctcggccagttgcgcaacgtatcatcgctgaacgggccatccatcaacgccagcgggtggtgactggcaacaacgcaactccagcttagcatccccatatcccggaaggcataacgaccgcctaccggaatcgcgcgtgttgcgccaatcgccagttccacgcgcccgtcggaaagcgcatcccagacaccgttgaacacttcctgaaagacaagaagttcgacatcatcaaaatggcgataaaaatcaacgatcatctgccgtgtacgttctggcctgacaatattatccactgcgatagctaactgaccgcgccagccgttcgctatctgctgacattgctggcgggtgatctgcatttttttgacaacagagcgcccttctttgagaaaccacgctccagcagcggtcagctccacatcacggtgccgtcgttcaaagagcggcaccgccagccactcttccagctgacgcacggtatagctgaccgcagaaggaacgcgatgcagctcctgtgccgcagcgctaaaactaccattacgcgctaccgcatcaacaacttcgagactatattcactccacatagtctgcctgcaaaatttttgaaaccagtcatcaaatattaccgtttcacaacactaatttcactccctacactttgcggcggtgtttaattgagagatttagagaatatacatgcaacctgggaaaagatttttagtctggctggcgggtttgagcgtactcggttttctggcaaccgatatgtatctgcctgctttcgccgccatacaggccgacctgcaaacgcctgcgtctgctgtcagtgccagccttagtctgttccttgccggttttgccgcagcccagcttctgtgggggccgctctccgaccgttatggtcgtaaaccggtattattaatcggcctgacaatttttgcgttaggtagtctggggatgctgtgggtagaaaacgccgctacgctgctggtattgcgttttgtacaggctgtgggtgtctgcgccgcggcggttatctggcaagcattagtgacagattattatcctagtcagaaagttaaccgtatttttgcggccatcatgccgctggtgggtctatctccggcactggctcctctgttaggaagctggctgctggtccatttttcctggcaggcgattttcgccaccctgtttgccattaccgtggtgctgattctgcctattttctggctcaaacccacgacgaaggcccgtaacaatagtcaggatggtctgacctttaccgacctgctacgttctaaaacctatcgcggcaacgtgctgatatacgcagcctgtagtgccagtttttttgcatggctgaccggtagtccgttcatccttagtgaaatgggctacagcccggcagttattggtttaagttatgtcccgcaaactatcgcgtttctgattggtggttatggctgtcgcgccgcgctgcagaaatggcaaggcaagcagttattaccgtggttgctggtgctgtttgctgtcagcgtcattgcgacctgggctgcgggcttcattagccatgtgagcctggtcgaaatcctgatcccattctgtgtgatggcgattgccaatggcgcgatctaccctattgttgtcgcccaggcgctgcgtcccttcccacacgcaactggtcgcgccgcagcgttgcagaacactcttcaactgggtctgtgcttcctcgcaagtctggtagtttcctggctgatcagtatcagcacgccattgctcaccaccaccagcgtgatgttaagtacagtagtgctggtcgcgctgggttacatgatgcaacgttgtgaagaagttggctgccagaatcatggcaatgccgaagtcgctcatagcgaaagtcactgatctatatcgatatacttatacttaggctgctaacaaaattttgttgtatgattgaaattagcggcctatactaatttcgagttgttaaagctacgataaatattatgtttttacggggacaggatcgttcccgactcactatggatagtcatttcggcaagggttcctcctttccctctgttctacgtcggattatagactcgcggttttttctgcgagatttctcacaaagcccaaaaagcgtctacgctgttttaaggttctgatcaccgaccagtgatggagaaactatgagtagtagctgtatagaagaagtcagtgtaccggatgacaactggtaccgtatcgccaacgaattacttagccgtgccggtatagccattaacggttctgccccggcggatattcgtgtgaaaaaccccgatttttttaaacgcgttctgcaagaaggctctttggggttaggcgaaagttatatggatggctggtgggaatgtgaccgactggatatgttttttagcaaagtcttacgcgcaggtctcgagaaccaactcccccatcatttcaaagacacgctgcgtattgccggcgctcgtctcttcaatctgcagagtaaaaaacgtgcctggatagtcggcaaagagcattacgatttgggtaatgacttgttcagccgcatgcttgatcccttcatgcaatattcctgcgcttactggaaagatgccgataatctggaatctgcccagcaggcgaagctcaaaatgatttgtgaaaaattgcagttaaaaccagggatgcgcgtactggatattggctgcggctggggcggactggcacactacatggcatctaattatgacgtaagcgtggtgggcgtcaccatttctgccgaacagcaaaaaatggctcaggaacgctgtgaaggcctggatgtcaccattttgctgcaagattatcgtgacctgaacgaccagtttgatcgtattgtttctgtggggatgttcgagcacgtcggaccgaaaaattacgatacctattttgcggtggtggatcgtaatttgaaaccggaaggcatattcctgctccatactatcggtagcaaaaaaaccgatctgaatgttgatccctggattaataaatatatttttccgaacggttgcctgccctctgtacgccagattgctcagtccagcgaaccccactttgtgatggaagactggcataacttcggtgctgattacgatactacgttgatggcgtggtatgaacgattcctcgccgcatggccagaaattgcggataactatagtgaacgctttaaacgaatgtttacctattatctgaatgcctgtgcaggtgctttccgcgcccgtgatattcagctctggcaggtcgtgttcagtcgcggtgttgaaaacggccttcgagtggctcgctaaaggctattctatcgccccctctccgggggcgatttcagatcaggcttctgtgcctggttgattcatggcattttctcgtgccgccagcacacgttctaccgtatctaccactgcctgagtttgtggatcgatttcaatgttgacgcgtgcgccaagttttttcttcccaagagtcgtgcgttccagtgtttcccgaattaaatggacgcaaaaacgcgttggcgtgacttcgccgacggtcaggctaataccgtcgatgccaataaatcctttgtacagaatatatttcatcaactgactatcctggactttaaaccagatctggcgattattttcactggttaatattttcgccacttcagcagtggtcataatatgaccactcattaagtgtccgccaatttcatcactgaatttcgccgcacgctcaacgtttacccaatcccccacttttaaatcgccaagattggtaatgcgtaacgtttctttcatcaggtcaaaactgacatggttgccgttaatttccgtcacggtcaggcagcaaccgttatgcgccacggaagcaccggtttccaggccgtccagcatgtggtcgggtaactccaccacatgcgtacgaaaatttggtttctcgtcaatgctcaccagttttgcggtgccctgtacaatccccgtaaacatacttacaactcctgaaatcagttaagacattctgttcagcacaatagcaggtggaaaacgcccttaccagtgaaggggtaagaatggctattttttcactggagaattaataaatcctcgctacaatagactgaatttcccctgcttcttctttttgctgcccattcaggcggctttttagtctctcatataactacaaataaaaggtgttcacgtgcagaagtatatcagtgaagcgcgtctgttattagcattagcaatcccggtgattctcgcgcaaatcgcccaaactgcgatgggttttgtcgataccgtgatggcgggcggctatagtgccaccgacatggcggcggtcgctatcggtacttctatctggcttccggcgatcctctttggtcacggactgctgctggcattaacgccggttatcgcgcaattaaatggttccggtcgacgtgagcgcattgcgcatcaggtgcgacaaggtttctggctggcaggttttgtttccgttctcattatgctggtgctgtggaatgcaggttacattatccgctccatggaaaacatcgatccggctctggcggacaaagccgtgggttatctgcgtgcgttgttgtggggcgcgccgggatatctgttcttccaggttgcccgtaaccagtgtgaaggtctggcaaaaaccaagccgggtatggtaatgggctttatcggcctgctggtgaacatcccggtgaactatatctttatttatggtcatttcggtatgcctgagctcggtggcgttggttgtggcgtggctactgcggcggtgtattgggtcatgttccttgccatggtttcttacattaaacgcgcccgctccatgcgtgatattcgtaacgaaaaaggcaccgcaaaacccgatcctgcggttatgaaacgactgattcaactcggtttgccgattgcgctggcactgttctttgaagtgacactgtttgccgtcgtggctctgttagtgtctccgctcggtattgttgatgtcgcaggacaccagattgccctgaactttagtagtctaatgttcgtgcttccaatgagcctggcggcagcggtaactatccgcgtaggttatcgtctgggtcagggcagtacgctggatgcgcaaaccgctgcgcggaccgggcttatggtgggtgtctgtatggcaaccctgacggccattttcacggttagtctgcgggagcaaatcgccctgttgtacaacgacaatcccgaggttgtaacgctggctgcgcatttgatgttgctggcggcggtatatcagatttctgacagtatccaggtgattggcagtgggattttgcgtggttataaagatacgcgttccattttctatattacctttacggcttactgggtgctgggcttgccaagcggctatattctggcactgaccgatctggtcgttgaacctatggggccagcaggcttctggataggctttattattggcctgacgagcgcagccattatgatgatgttgcgtatgcggttcctgcaacgtctgccgagtgccatcattctgcaacgagcatcccgctaataaagacaaggcgcaaccttcacgggttgcgcctgtatttttacgcaggctggagcgttgcgccaatcccgtcttcgtctggctgtaatttcagagcgttacacagagtttgccgactggcatctgttatctcaacgtgtatatccccggtaacttcccctttcacattgatgaagtcaggactaatttcttttgcactggtttgcaggcaaatcgctccctctccgcgcaggcgtttcactttcagttgcacatgcgttgccgcatcagtgatcagccacagttttccaccattcagattgatgttaccaacaatgaaagtgacactgtcaccttttaccgtactgccgtctagaatcaacacaccgccctgctgtacagtaatcgtactttgttgcagctctgcgccataaccaataatcatactagcgccgtccagtaatgcaacactcccggtcagttcaaccggtgcgcgatcttcctctacgacaaaattttcgtccgcgctggtgggactcaacaggatcactgtcccaccttgtattaccgcgttttccagcgtaccggcatgcacttcagcccgaccacccacattcacggacaggttttgcgtcttaccggaactgtagagctgaaggccatccgtccccagacgataaatggatccattctcaacaatagtgtcagagtcttcaccaccgagattattcatggtgccaccagcaagcaacgtatcactggctttcccggccagcataaaaacgccgccctgattaatctcacaattgctggcttccccacctggatacaccaacaattcaccaccttcatctaccacgaccgcactggttgtcccattaaccaacaggccgccctcttgatcgagaatgattttttccgcgcgatgtccttccagtacacgcaggttaccgccattttccagcaacaaaccgcaggcataacctttatcaacgctgaattcaccttcgggatggcggccattaaccgtagcgagcgtagagagactaattgcgcctccctcggactgaacaatatctgtggcaatggcaccatcgctgacgcttagcgtgccattgttaccgtactgtgtgcatttggcgatcccaccggttgccactttcaaccagccagcccccgtgaccacggtattttcggctcttccgccagcttcaacaatcaactcgccttcagtaagttgcgtcgcgccaatgacctcgccggtcttaacaatttgcacgttcccgtcgctcatcaagtttttcgcatcagatcccatgatttattcctttgctgcatctgtgtgcctttattgctacctaagtgtaaaggctacggaggatttatccacgacagatttgagatggtggcaaacaactctgtttaaactctgatacacgaattattgggttgtatcagatgtaaatgcgatcctgaataaaaatcacccttgcaaatcaacaaaatatagccaatttgcttaaaagctctgcaaacggtcgaaatagcgcagaaaattacgttttgcctcttgccaccttcccactctgccgctaatattcgtccccgttgtcacctacaacgttgcgttcatagctcagttggttagagcaccaccttgacatggtgggggtcgttggttcgagtccaattgaacgcaccatcctgcgtccgtagctcagttggttagagcaccaccttgacatggtgggggtcggtggttcgagtccactcggacgcaccagattttcttaatctggtcttctcctttttccctctgtttcttctctgtatccaatacgttaaaagatttacactgtcttcgtatgcgttatcagaaggagaatcgctatggcaactttgttacaacttcattttgcttttaatggcccatttggcgacgcaatggctgagcagcttaaaccacttgctgagagcattaatcaggaacctggttttctgtggaaggtatggacagaaagtgaaaagaaccacgaagccggtgggatctaccttttcactgatgaaaaaagcgcccttgcctatctggaaaaacatactgcccgactgaaaaatctcggcgttgaggaagttgtcgccaaagttttcgatgtcaatgagccacttagtcaaatcaatcaggcaaaactcgcctgacagaatttaatcaagggcggttagcgcccttttcatccctgtctgaaatttctcaaattctaaaaatctcaaccaaacttatctgataacactaaattcgaaagaatgcgtacaggtaagtaacaatgaaaaaaattgctattgtgggtgccgggcctacggggatctacaccttattcagccttctacagcaacaaactccactttctatttctatcttcgagcaggctgacgaggccggtgtcgggatgccatacagtgatgaggaaaacagtaaaatgatgctggcaaatattgccagtattgaaataccgccgatttattgtacgtatctcgaatggctacaaaagcaagaagacagccatctccagcgttatggcgttaaaaaagaaaccttgcacgatcgtcagtttttaccgcgaattctgctgggcgaatatttccgcgatcaatttttacgactagtagaccaggcacgacagcaaaaatttgcagtggctgtttatgaaagttgccaggttaccgatctgcaaattacaaatgctggcgtcatgctcgctacaaatcaggatttacccagcgagacgtttgatttagcggtgatcgccacgggtcacgtctggcctgatgaagaagaagcaacccgaacgtattttcccagcccgtggagtggcctgatggaagcaaaggtcgatgcgtgtaacgtgggtattatgggaacatccttgagcggactggatgcggcaatggcagtggctattcagcatggtagcttcattgaagatgataaacaacacgtcgtttttcaccgcgataacgcaagtgaaaagctaaatatcacgttgttgagccgcacgggtattttacccgaagccgatttctattgccctattccctacgagcccttacacatcgtcaccgatcaggcattaaatgctgagattcaaaaaggcgaagagggccttttggatcgggtatttagattgatagtagaggaaatcaagtttgctgatccagactggagtcaacgcatagccttagagagcctgaatgtcgattcctttgctcaagcctggtttgccgagcgcaaacaacgcgacccatttgactgggcagaaaaaaatctccaggaagtcgaacgcaataaacgagaaaaacatactgttccctggcgttatgtcattctgcgcctgcatgaagccgtacaggaaattgttccacatctgaatgaacacgaccataaacggttcagtaaaggccttgcccgggttttcatcgataattatgcggcaatccctagtgagtctattcgtcgcctacttgccttacgtgaagcgggaatcattcatattctcgccctcggtgaagactacaaaatggaaattaatgagagccgcaccgtcctgaaaacggaagacaacagctacagctttgacgtttttattgatgcccgcggacaacgtccgcttaaagtgaaagatatccctttccctgggctacgcgagcaattacagaaaacaggggatgaaatccctgatgttggcgaagattatacgttacagcaacccgaagatattcgtgggcgcgtagcgttcggcgcgttgccctggttgatgcacgaccagcctttcgttcagggacttacggcatgtgcagaaattggtgaggcgatggctcgggcggtcgtaaagcctgcatcccgtgctcgtcggcgtcttagctttgattaaaggtaaagctatcagcactcaacaaactgatgctgttcattaagacgatagcggactccggctcgaatattgttttcaccttcaatggcgacggcgaagcgaactctttcgccgtcatgatatgccagtgcggcgcttcctcctggcccgagaataatactgtcgaccacgcccgtgctcactaccgtactattttcaccgctggcaatgatgtgtacattgtcgccgctgttggcaattctggcgtttgcgccaaagctggcgatttgcaccaggtcaccattactggcgacatgacaccgttcacccaatgtacaaacgcgtactcgcattccggtattcgcaatccgactgctatctccagcgctgcttatccggctagaattaccggttacagcaacccgtgcgcgttcaccggagctgccaatgtgactgttaaagccgacacttccaatccgcacgctataacccatactggcaatttgcgcggcatacccagcggttgcgattctggcgttatcctcacaacagccgatgcgagcatgatcgtcgctgcgggcaaactgactgcaaaatggtctctctccggggtctgtggccagtttttgcatagaggaaacttcctgatgcgcgaagttttcatccgccagccattttttccacgcatactcaaccagactctccgcccagtccgtatatccttcctcaatcagtgcatgatgaatatcggcataactaccgccgcgtgggaaatggcgcaggaaccagcgatacatcaccgctccgatacgccattctcgcaggtctgcttgtgtaatgatcattcgttagtgccggtgatagccatcgaccatgcttttaaaggtttcgtgtggcgtacgccccgtggtgcaaagataaagatgaccgaagataaaaaagaggcttataaatgccagagcaaaatgtgtctgcaataaccagtatcttacgccaggaaacacatctcccacggcttgcggatagagacacagcagccccgtcaatagtaacaacggcagcaatccatacatgacaccaacataggcgacctgctgtaagggattaaatttagactgggttgttgccgggaaaggatgttcttccccctgcataatgccaaacaaataaaatcgcgtttgttttgccgctcgttccagccacccctgacgacgaatgcgatagtggtgaccattatccccaacggcattgatcagcacaaagccgagccagcatgccagtaacaaaaatccgcaaacttcatgcaccgcaaccagacttttaaccgcagttgcgcccaccatcgcaaagtgatttatcagcccactggccagcaacaatacaaagagtaacgcattgctccagtgccataatctgaccgctttgctgtaaagataaatcttctcaccatgatcggtggcacttttcttcacgccacgagcacgaagcaaggcatgcagccccagcaccaaccacatcccaaccagcaatactccggcaatgatcaaccacaccggccaaaattcgggagtgaactgtggcacatagttcgctaactggctctgaaactgttcagcatgttggctcgggttcatacattttcctttttaatcaaatgttgaccgaaccggcgatacagatgcggtttcccggcaccaggtagctgatattgatagtatttattttgctgcaaccacgcctgaatttctgggctatcttcgcgaccaaagatcaatgcgtgttccgggcaggcgctgacgcaaatgggcggaaagccttttgccagtcgggactcagcgcagaaatcacatttatctgccactttagtgacagggttaaggtagcgaacctggtacggacaagcgccaatgcaataactgcagccgatgcactggcttttttctacccgcacgatcccctgctcatcacgccagctcgcccccgtcgggcaaacgtcgatgcacggagcatcttcgcagtgctgacaactctggcgaaaaaagtgatactgcgtttcgttgtcgttatcggtgactggaatgtgtgctatgcttaaacggcttccctgagcggggacgtggttagttttacggcatgcgcgggcgcaaatattacagccattgcaccgactctcgtcatgaatcatggcataccgaacttccttttcttgcctcgtgttcgctaacagagaagacgcagaaccagtaaaaaagattactgttcccatccccagaacaaatttgcgtcgagtgaaggacatctgattatcccctaatgcagtggctgcaactgtccaccctatccatgacatctccctgaaatttcaggggttctgaaactgctctacctcgaaccattcgcataagccataagccttgccataggtcataaatcgctcgctaaacaagtacaacaccgccgtgctactctccacctgccgtatatcggcatattcaggtgcaacatccatcgcggcgatcgcggcttcaatctgcgcttcctggaagtaatatggcgcttgcatcagcatggcgactttgtaaggacgaggatacgtctggcactcaaaacgaacggcgtgtgcaatggcgcgacaaatgtcctgctccacaacttgcaaagacatcgccgcgtagttttcactcatggcctgcgtactgtaatagtaatcatccttgcttcccgtcaaacaagcgatatccgcgtagtctccgttctgcttaatgctttccagcaaaacactcagttcctcttctgcaaccaaatagggtgggctgagaaacacggcgcgcgccaccagctgcccagccgcagaatgctggcgaatgaactcagccaggatttcagcaggttctggttcggttaccgtatcaacggggtgacgcatcccctgcaaccattgccgcttcgcctcgtcaacttcgctgactttcgctaacggcaattcatcctgatggttcatcttacccattccttacgcaggcagtagattgtgtgctgccagatcggcggcaatatcttccagccccagacgctgcaatgtttcgcgggttggacaaccaagctgtgggtcccagcccatttctttgtagaacatcgtgaggctagcatgcatatcgtcacgatccattttgtcagtaccttcagtaaagaccgggatctgcggatccttgtcgaatacccaggaacagataagatcgtgttcattacgcatatctttggtttgcatcagttttaccgtgtaggcacgatgcaacgtaaaaatacgctctgcagctaaatctaatttttcctgagtcatctcttcgccggtgatcgctttgaagaatttggcttcaagcgccagatcgccccggtaattacggcttttcagcgggctaacggtcattggccagacccagttgcacagggtgacggcgttatgcaaacagacccgcaacaggctccactttgcatatttaatttttgcgtcattgattggcgtgtagtttttggtttcatcgtaagcatcttcagaaccaaaaagttctttcgccacttcacgttgcagtttcaatggcaagccggaaccaataaagttgatatgggtatgcgtcatgcagtcacggttgaacatacagttaacaatggaaccgacctgcgcactcgcttcattggcatggtgaaccggatagccaaacgggctccagagtttatttttcgcgtagccccagtactcttcacccaaattccagcgttctgcgatggcataactaccatcagccaggtgactcagctcacccacacgatgcgccagacggtagtaaaaatctttaatgaagttaacgtcacccgcttccagttgatcccagcgaatttctgcatactcttcagctggcagaacacgcttgaacacacctttgctgtaacaataagtaaagtcgcgatgcaactgcccgtagttacaccataggccgtagtcatcgaacaaattcagacccaccaggttaccaatcacacgaccatcgtctttatcttcaaaatctttcggcccgttcgggaagatggtggtatggacaaagtttgctacacaagtgttaccacctgtgctgggcacgccaaactctttcacccgaggaatattcatttgggtcatacaacggatcgggcaagagtggcagccgctcatttttactgtgtatttctctgccgccggtcctaagtcaaaaacggatttataggtacgaaagccgaccgtattctgattgcctggcggaatttcacccgtttcaatcggaccaccttcagccgcgccccaaaacagccctttacgtgctgtccagcgactcttgggatcactatactctgcccagctttgtggcgtacttggcacgacatggttgttattcgcaccaataagttcagtcatcatgtaatcattgagacgcttcatctcctgacgatcggcaatgttgacccctttcgtcccttcaaccgcaatcgctttcaggtttttgctacccattattgcgccagttcccgcaccgccgctgtggttacggctattcaacatgccagagagaggaacaaggttttccccagcctgaccaatagccgccacacaggtttccggactggtcaatcgacaaatttcttccgtcgttgcgcgcgtcccttttccccataagaaatcggctttttccaggctaactttgtcatctttaatcttcagccataccggacttttcgccttcccttcgataataatgacgtcgtatccagcgaatttcatttgcgctgcaaaaaagccacccatatgggcatcgacgactaaatttcctttggtaaaagtagaaagactggtgatatttacgcgagaactacagggggcaccagatccagttaatgggccggtagcaaagactaatttattcgcttcatcgaaaggtttcgtgcctggcggtacttcgtcatacataattttgtagccgaagcccatgccaccgacaaaacttttaaacttactggaatcttcgagggtaatatttcctgtcgtgagattgactcttaatatattacctgtccaaccgttagccatgattttttcctttgcaagattcacacagtaatatctttccactcgataatttttaacgcccctgttgggcaggcgtttgcgcattcaccgcataacacacatttgctggattttttactttcggtatttacggtggccatcatccacgggcatgccgtagtacaggcgctacagccaatacagcgtttatgatcgacggtaatacagccttctttctgctgccaggtaatcgcaccaatcgggcagacgttcatgcattgcggctctttgcattgacggcaggtgtccgcggtatagttgagatcgccatacaggccgccgccagagccaaccccgttgtcgccaaagaaataattgcgatggattttgatacgggagaagaatgtccctacactgccatcgttgaagttggtacaagagatttcacagcggtggcaacccgtgcatcgcgctcgctgggtcaccagcacccctttgggggtatttatcaaccctactgtgccgctatcaatatcttcctgtttgcaacccaaaagactcagtaacgcaggggcaattgttagaccagcaaggccttttccacttatacgcaagaattctaatcgcgttaagccaatatctaatagtggacgatcaaccgggttcatttatttcgcatcctcttcgcaaacacagtgctgacaattcagcagcctgatattaagcattcaactaatacgctgctgactctgtccccaacaccagatattttccctaacccgatagtgtatgagaaaagattaacgccgataaactaatcctttatggttaggagaaaaaataatgtgattattctgagcccttaacattgatcgttatcaattaaaattacaaagcaagaaattataagtgaactgatatttattatcatttgaaataaatttaacttaagcgacaattatttgtgactttcattgcagaaaataaaaataacattatcgctataaattaaaatacataccgaaattcgtataatttcagcagttgttatttagaatgattaactggaccgcaactgaagcaagaatatcaggatgaagcttaccgcctcatcctgaatggtcattttaccagtgcgttaatgacggtttccatcgcctgcttttccagctcactgcgctgaatgcgtttattggctaatgctgtacgtaatacgcctgcgataacaatatgctttggttcctgccccagatcgcgcatttccagcacaactttaccgacaactctgcacatttctcggtacagttcatcctcttttgtccgatttcccattctttatacctatttatcatgccaactatcagcatatatcaatctaaccaattaaacaaaaatcaaacaaaatcagacaaataacgcgataaattattttaactgtagcaattgagcgatgatatatttatacaccggatgaactttcacttatcctcacactgacaacttcggcaccagacgttgcgcaaacagtgaagtttttgcgtaaccttttccctggaacgttaaatctttgataacaatttattgtctaacaagttgtatattttttgaaacgctgtttttgttttccttttggattaatttcagcgtataatgcgcgccaattgactcttgaatggtttcagcactttggactgtagaactcaacgactcaaaaacaggcactcacgttgggctgagacacaagcacacattcctctgcacgctttttcgatgtcacctatccttagagcgaggcaccaccactttcgtaataccggattcgctttccggcagtgcgcccagaaagcaagtttctcccatccttctcaacttaaagactaagactgtcatgaaaaagaccaaaattgtttgcaccatcggaccgaaaaccgaatctgaagagatgttagctaaaatgctggacgctggcatgaacgttatgcgtctgaacttctctcatggtgactatgcagaacacggtcagcgcattcagaatctgcgcaacgtgatgagcaaaactggtaaaaccgccgctatcctgcttgataccaaaggtccggaaatccgcaccatgaaactggaaggcggtaacgacgtttctctgaaagctggtcagacctttactttcaccactgataaatctgttatcggcaacagcgaaatggttgcggtaacgtatgaaggtttcactactgacctgtctgttggcaacaccgtactggttgacgatggtctgatcggtatggaagttaccgccattgaaggtaacaaagttatctgtaaagtgctgaacaacggtgacctgggcgaaaacaaaggtgtgaacctgcctggcgtttccattgctctgccagcactggctgaaaaagacaaacaggacctgatctttggttgcgaacaaggcgtagactttgttgctgcttcctttattcgtaagcgttctgacgttatcgaaatccgtgagcacctgaaagcgcacggcggcgaaaacatccacatcatctccaaaatcgaaaaccaggaaggcctcaacaacttcgacgaaatcctcgaagcctctgacggcatcatggttgcgcgtggcgacctgggtgtagaaatcccggtagaagaagttatcttcgcccagaagatgatgatcgaaaaatgtatccgtgcacgtaaagtcgttatcactgcgacccagatgctggattccatgatcaaaaacccacgcccgactcgcgcagaagccggtgacgttgcaaacgccatcctcgacggtactgacgcagtgatgctgtctggtgaatccgcaaaaggtaaatacccgctggaagcggtttctatcatggcgaccatctgcgaacgtaccgaccgcgtgatgaacagccgtctcgagttcaacaatgacaaccgtaaactgcgcattaccgaagcggtatgccgtggtgccgttgaaactgctgaaaaactggatgctccgctgatcgtggttgctactcagggcggtaaatctgctcgcgcagtacgtaaatacttcccggatgccaccatcctggcactgaccaccaacgaaaaaacggctcatcagttggtactgagcaaaggcgttgtgccgcagcttgttaaagagatcacttctactgatgatttctaccgtctgggtaaagaactggctctgcagagcggtctggcacacaaaggtgacgttgtagttatggtttctggtgcactggtaccgagcggcactactaacaccgcatctgttcacgtcctgtaatattgcttttgtgaattaatttgtatatcgaagcgccctgatgggcgctttttttatttaatcgataaccagaagcaataaaaaatcaaatcggatttcactatataatctcactttatctaagatgaatccgatggaagcatcctgttttctctcaatttttttatctaaaacccagcgttcgatgcttctttgagcgaacgatcaaaaataagtgccttcccatcaaaaaaatattctcaacataaaaaactttgtgtaatacttgtaacgctacatggagattaactcaatctagagggtattaataatgaaagctactaaactggtactgggcgcggtaatcctgggttctactctgctggcaggttgctccagcaacgctaaaatcgatcagctgtcttctgacgttcagactctgaacgctaaagttgaccagctgagcaacgacgtgaacgcaatgcgttccgacgttcaggctgctaaagatgacgcagctcgtgctaaccagcgtctggacaacatggctactaaataccgcaagtaatagtacctgtgaagtgaaaaatggcgcacattgtgcgccattttttttgtctgccgtttaccgttactgcgtcacgcgtaacatattcccttgctctggttcaccattctgcgcactctctacactaggcgcattgctggctgcgggagttgctccactgctcacgctaaccggataccctgcccgacgatacaacgctttatcgactaacttctgatctacagccttattgtctttaaattgcgtaaagcctgctggcagtgtgtatggcattgtctgaacgttctgctgttcttctgcgcttagtggtcgatgtacttcaacataacgcatcccgttaggctccacggaatatttcaccggttcgttgatcactttcaccggcgttcccgtccgcacgctggagaacaaggctttaatatccggtgcattcatgcgaatacacccactactgacgcgcaaaccgacgctgtccggcgcactggtaccatgaatgaggtattcgccattaccatgcgcgaggcgcagtgcgtaacgtcctagcgggttatttggtccggcaggaacgactggcggtaatttaatgccacgctccaggctacgctgacgaatgcctgccgtaggcgtccaggttgggttagggattttctgcccaacacgcgtttccatcaccggcgtttccagcccctgcaatccaatacctattggataaacctgcacaatattttctcccggcggataataataaaggcgcagctctgcaaggttaacgataatcccctgacgcggtgcatcaggtaataacagttgactaggaatagttatcgtcgtaccaggttttggcaccggggcgatagtgttattggcttcaaggatcaacattgccgcagtatcaaaacgtcgggcaatagcctgaaggtttttatccccttcttgcaccgtatacgtttgattttgcccaaccagtcggcttccggttggtggtagcggataatcaaccgcccaggcagcctggatggcgctaaaagcgccgataagcgtgagtgtaagcaaagacgcgcgtttcattgtaaacctcctgtatttgccggagactcacgctgaaacgtcggatggcgcttatgttcacctgaaaccaaaacactcctgtgcaggtcagtgtaaacattgaccatccggcaatgtgagccaaccggatgaaagctgtccttttagtttagctaagtgcagcggctttggcgcgaattgcgcgaatcatcgcttccagaccttgactacgagatggggtgagatgttgggtgagcgccattttttcaaaccacggacgcacatcgaaattgacaatatcctgcggcgtcatctgatcgtagagaataaagacgaccgcaataagccctttcacaatcgccgcatcgctgtcgccctgtaattcaataattccctgggcattctggcgcatgacaatccacacctgactctgacagccctgaatgctattttgtggacttctgtcttcgtcgcgtaattctggcagacgctggcccagctcaataatgtagagatatttctcttcccagttggcgcagcgtaaaaaattacgcagcaacttttctttatccggcaataaagccatagtgcctccctgttatcccagcaaacggtgaatacgttgcaggccggtcaccagacgatccacttcttcatgggtgttatacatggccaggctcgcccgacacatcgcagggacgttgtaataggccatcaatggcattgcgcagtgatgtccggtacgcacagcaatgccgtaattatcgagaaaactgccaacatcataggcgtggtgtttaccgagattaaaagcaataacgccaagcctgttttgtgggccatagagagtgagatccggtacagattccagctgacttagcgcataatgcatcagattctgttcatactcggctatgttattaagccccagcgcgctaacatactccagcgccgcgccaagaccaatgatgcccccggtattgggtgtaccggcttcaaaccgccatggtgctttggtccaggtagtgccttcactcaggctgacggtggcgatcatagaaccgcccccttcccacggcggcatctcctgcaacaaggcttctttcacataaagaatgccaattccggtggggccatacagtttatgcccggagaacacgtaaaagtcgcaatccagcgcctgaacatccaccggatgatgcatcaccgcctgagcgccatccaccagcacttttgcgccatgctggtgcgcaagcgtgatcatttccgccagtggattttctgtgccaagcacgttggagacatgagtaattgccagcaggcgagttttctcatcaaacagcgtaggcagcgtctccagttgcaacgtaccatcgggattgagcgggatcacacgcagctctgcgccaacgcgtgcgcaaagcatctgccagggaacaatgttagcgtggtgctccatctgactgatgatgatgttatcgcccgcccgcacgttgctgttgccccagctattggcgaccagattgatcccttccgtcgtgccgcggacgaacaccagctcttccgcgctacgggcattaataaacaggcttgcccgcttgcgcacgttctccattttctcggtcgcctgggcgcttaaggtatgaataccacgatgcaccgccgcgtagccatgacgataaaactcggcctcggcgtcaatcacctggctcggtttctgcgcactggcggcgctgtcgagataagccagcggcaaaccgtttacctcacggctaagcaccggaaagtcggcccgcactttgtcgacggaaaaaatcatcttgcacctcctggcagccgttgaccgattcgggccagcacctgctgtttaagcccctcatcacgcagtgcttccgtcagttcggcagcgaaggcgtaaatgatcatctgctgggcatcctgctgattgatcccgcggctgcgcagatagaatatctgttcatcatcaatacgccccaccgtcgcgccgtggctgcatttcacatcatctgcatagatttccagctgcggtttcgtatccacttccgccagtttgcccatcagcagattgttgttggtcatctgaccatccgttttgatggcgtgctgcgcgacgttgatcaaaccgttaaataccgcgcggcctttgtcgctgacgatagttttgtgcaactgtcggctgttacaaaaacctttattgtgttccagccaggtacgggtatcacacacctcgtttttcaccggcatcgccaggctattgatccgcagcgtgctgttttcgccattgagttgcgtactggtgttgtgtcgtaacactgcgccacccagcaggaaactgtggctaaatgcggtggcatcctcagccagcaacaaatcgttatgagcaaagtggtgactgagcgggttttcaaacgccagcttgatatgctgcaagtgggcattcgctgcgacgttgatagtgaaccgtgccccggtaaaatgacgagcatcattcaggctgacaaaatgttcgatcaccgttgcttcggcaccttccgccagatccagatgatgtcggtaatgggcagtgttcacctcttcacctgccacgccctgggtgatatgcattaacagcaatggctttgccggccgttgaccgcgcttcacggcgatatgcgtcacgctttgtgccaggctttccgtcaaatgcagaaacacttccgcctgaatagcgtcgggtaaaccctgacggtcgtcgttaatgctcacttcatatccgctgccttcagttgcatcgctcagtgcgggcacgtaacgcccatcgacaaacaccagccgcacggagtctaacgttaacgctaaggcatcacgctgctgtggggatatctctcccgcaatgctgacaaactggctattgatcagcccttccagcggcgtatatttccagttttcatgtttacgtgtcggcagtccggtacgcagcaattgttgtaaatgctgctgtgcttgcggggagcgttttgtcccttcagcttcaaacaagtgatgccactgttgcagcgcgttactgctgttcggtaagccagccataaccctgctcctccagttgtttgaccaacgtgaaatcgccggatttcacaattcgtccctgatatagcacatgaacgtaatcaggcttgatgtagtcgagaatgcgttggtagtgcgtaacaatgatgaaactgcgcttgccatcacgcaggctgttcacgccatcggcgaccacttttaatgcgtcaatatccagcccggagtcgctctcatcaagaatgcataactccggttccagcaccgccatttgcaaaatatcgttgcgctttttctcgccgccggaaaaaccaacgtttacgctacgggttaataaatcttccggcatcttcaggagagcgattttctcttccatcaaatcctgaaaatcaaagcggtcgagcgtttcctggccgcgatagctgcgcaccgcattaagtgccgtttgcaggaaaaactggttactgacacctggaatctccaccggatactggaaggccataaagatgccttcgcccgcgcgatcttccgggctcagcgcaagcaaatctttgcctttgaactcaaccgtgccgcccgtcacttcataatcttctcgcccggcaagcgttgcgcttaaggtacttttgccgctaccgtttggccccataatggcgtgaacttcgccgggatgaacgtcgaggcttaatccgcgcaggatagctttatcttccacgctgacgtgtaaatctttaatacttaacatgtttattccttatccgacgctgtgttcaagactgatggcgaggagtttttgtgcttcaacggcaaattccaacggcagctcgctgaacacgtctttgcagaaaccgttaacaatcatgctgatggcgtcttcttcgctgatcccgcgttgcaggcagtaaaacagttgatcttcaccaatacgacttgtcgttgcctcgtgttccagttgcgcactattgttacgacactcaacatacgggaaggtatgcgccccacaattagcgccaatcagcatactgtcgcactgagtgaaattgcgcgcattggttgccgtcggcatgattttcactaagccgcgataactgttctgactatgtccggcagagatccctttgctgataatggtgcttttggtgtttttaccgatgtggatcatcttggtgccggtatccgcttgctgatgaccgctggtcagcgccacactgtaaaactcaccaatggagttatcgccgcgcaaaatgcagctgggatatttccacgtaatcgcactcccggtttcactttgcgtccaactcattttgctgttttcgccttcgcacaaagcacgcttggtgacgaagttgagaataccgccggtgttgttatcgccaggaaaccagttttgtaccgtggaatatttcacctcggcgtttttatggatgatgacttccaccactgccgcgtgtaactgatagctgtcacgcaccggagcggaacagccttcaatgtagctgacgtagctgtcttcgtcggccaccagaatggtgcgctcaaactgcccggttttttctgcgttaatgcgaaaataggtggaaagttccatcgggcagcgcacgcctttaggcacataaataaacgtaccatcagaggctaccgccgcattaagcgcggcaaagaagttgtcattccccggcaccacggtgccgagatatttacgcaccagttccgggtgatcgtggatcgcctcaccaaaggaacagaaaataattccctgctccgccagtttttcgcgataagtagtggcaacgctaacactgtcgaaaatggcatccaccgccacctctttgccttcccgcacgggaacgcccaactgctcaaacgccgcctccacctctttacttaaaaaggcgttcgcgccagtttgctgcaccgcgccaggttcagacgcgcaagtgtcgtcacaattaccgcagcttggtgcactgtagtagctgtaatcctgataattcagcttgtcgtagtgcgctttcaaccagtgcggttcttccatctccagccatgcgcgataggcgtttagacgaaactccagcatccactccggctcattacgcttcgcgctaattgcgcgcaccacctcttcgtttatcccctttgccagctcatcggtggctaactgggtgaagaatccttctttataattcagcgggccgccggtccaggttttgacatcgtcagttgcttcagtattacgagacatagtaccgcttataccccaaagctttcgccacagccacattcattctgggctttagggttgtgaaatttgaatatctgattaagtccttcacgaacgaaatcgacttccgtgccatcaataaacggcatcgcttgcagcgggacaaacagcttcgcgccgtcgtgttcaaacagcagatcgtctttgtccggctcgctaacactgtcgagcacatagccaaagcccgcgcagcccgtttgcttcacgcctaagcgcacgccgaccatacccggctgctttgccaccagctcacggatgtgtatcgccgctgcgggtgtcagcgttaagccttgccaggcgaaatcttgtgggttaaaggttccactatgcatgtccatcgatttacctcacttcatcgctttcagcgtataacagcatgttagtgataatgattatcagttcaacccagcaaacgcaggggctttaccgtaaaacatgctttttgcctgcttttaataagcatagaccctgatgtgtgggttaacaggcacgctaagaattaggtatctcattgttagataatggttattatctaaggagcattaaggctgtgatgaaaaagaaaaagttgtattgaaaatgactatttaagagataggtaaaaaagtgcagcgttcagaaataagaaaacccttaagtctgtgcgacacaggcttaagggtttctaccccatccggcgcttatctccggcactctcagtggcttagctcttgaaggggcgataagaataatctcataaagctaacccgccgttttaacacaaactgcgattagtattatttttgaacaatatcaggcggtagataagcagtattaagaaggtcatcgaacctggacggaggttaatccaggtcgatttggcgaacttgcggcattaagtcaggatcaatgcacgcccagacgccaggcaaagtagatttcttcttttaattcagcagaagagagagtaagcaggtcagcaaattcaagttctagttgtttcagacgtttgagatattgggcaggactaagattgctctggtcacggcgtaaaaattcaatggccagctgggtgggatcaagttgagtagacatagcatcctcgcttttagacaagacctgcacagtataccaccgtttactgtgcagataatgaccaaaagcaatatgcgtcacacttttctggtgacaacgtcacaaaatggcggtcgtcaatcgactgctacagcacaaacgccctttctcatcgaagatttcaatctgccagacctggtgacggctaccgagatgcaacggtttgcatacgccgcgcacccgcccttctcgtgcgctgcggacgtggttagcattgatttccagaccaaccactttttgctcaccttcggtacataaataaccggcaacggaaccgatactttcggccagtaccacggatgctcctccatgcagcaacccgaaaggctgctttgtccggctgtctactggcattgtcgcttcaagggtgtcatcaccaatatgttcaaagcgaatatccaggaaccccaccatgtttccttcacccatagcattcagtgcttccagggtgattttccgtttccatatcatttaataatctccagtaaagcctgcacaggatggcgtacccccgtgccttcaacccgttttacctggctacggcaggaatatccggtcgccagacagcggttacgcggcagtcgctgcatagcctgatgccaggataactcatagatcccgaggctattttcatggtttttcgcttcatgtccgtaagtccctgccatgccgcagcaacccacgctgacattttccagtttcgcgccaaaacgggcaaatatcgcggcccattgtgctggcgcacccggcaaggcggtaacttcggtacagtgaccaaagaaataccaactttcaccgctgactgtagccactggctgactctcaagtgcgcttgccagccattcattcgccagtaagacgttaaactcgccacgctcctcgcccagcgccagtttatattcatcgcgataacaaagtaccagcgccggatcgacgcccaccattggcatacccagcttcgccatacggttgaggaaatccgccgtctttttcgccgtcttcgcaaaacgattaagaaaacctttaatatgctgggctttgccatttgggctaaatggcagtaacacaggctggaaacctaatttttcgaccagacggacaaaatccgccaccacttgcgcatcgtaatagctggtaaaggggtcctgcaccaccaacactgtgcgcgctttctgctctgcattgagagattcaagctgttccagcgtcatgtttgcgctgcgatgccccaccatttgttgttgtaggctggggacgctcagcagcggcaaatcaaccatgccgatatgtttttcgctgagtttgcgcaccagcggctggttaatgaagaagttaaaggttttcggcgcgcgtgccatcagcggcgcgtagctctcgaccgtagcgacgaggtggtcgcgcagcgggcgtaaataacgggtgtgatagagctgcagaaaacgagagcgaaactccggcacatcaattttgatggggcactgggtgctacacgctttacaggccagacagccgctcatcgcctctttgacttcgtgactgaagtcatattcgcctttattcgcatgccagctattgcgcgtgcgggcaattaacgtccgcaaactgacgccggattcaggcagttcttgttccagtttgagtggatcaacgccgcgatccgccaacaaacgcagccattcacgcaccagcgttgcgcgccctttcggactatgaatccggttctgggtgatcttcatgctcggacacatcggactacgggcatcaaagttgaagcataaaccgttgccgttacactccatcgcaccgcgccactgctggcgtaccgcaatggggatctgccgatcgaatgtaccgcgcttcaccgcgtccactttcatcatcggcgcatcgagaccttctggcgggcaaatcttccctgggttgagtcggttatgcgggtcaaatgccgctttcactttgcgcagttctgcaaaaagttcctcaccgaaaaacgccgggctgtattcagcgcgaaaacctttgccgtgctcgccccacaacaaaccaccgtatttcgcagtcagcgccaccacgtcatcagagatttgcttcatcaaaatctcttgttgaggatcgcacatatccagcgctggacggacgtgcaagacacctgcgtcgacgtgaccgaacataccgtagcttaagccgtggctgtcgagcagcgcgcgaaattcagcaatataatccgccaggtgttccggcggtacgcaggtatcctcagcaaacggaattggcttagcggcacctttggcattgccaagcagaccaacggcttttttgcgcattgcatagatacgttcaacccccgccagctcacggcacacctgccagccgatgacacctgcttgatgactggcgatcagctcatccaaccgcgcacagagtgcatttacccgctcatcaatcagcgcctcatcatcaccagcaaattccacaatgttcagcccgagcatctcttggtcaggcacatcggtaatcaactcgctgacggaatgccagacaatatcttcccgcgccagattcagcactttactgtccaccgtctctacgctaagcgcccgcgcctcaaccataaacggcgcgttacgcagcgcagagtcaaaagagtcatatttgacgttcaccagacggcgcactttaggcaagcgtgtaatatccagccgcgcttcggtaataaaggccagcgtcccttcactacccgtcagaatgcgcgtcaggtcgaactcggtcatctcatcgttaaagacatgacgcagatcgtaaccggtaagaaagcggttaagtttggggaagttgtcgataattaactggcgttgctgacggcaacgttgataaaccgtgttataaattcgcccgattgtggtattggatttacccagcgtttccgccaattcgacgggtaaaggttgcgtatcgagaatatcgccccccaacaacaccgcgcgtacgccaagtacgtgatcactcgttttgccatagaccaggcttccctgaccggatgcatcggtattgatcatcccaccgagcgttgcccggttgctggtgctaagttccggcgcaaaaaagtagccgaacggtttcaggtactgattgagttgatcttttatcaccccggcctcaacgcgcacccagccctcttcagggttaatttcgatgatgcggttcatatggcgggacatatcaacaataatcccctggttgagcgcctgaccgttagtgccggtgccgccgccgcggggggtaaagatcaggctactatagcgttcctgcgcggcaagacgggcgatcagcgccacatctgcggtactacgcggaaataccaccgcatcggggagaagttggtaaatactgttgtcggtgctcattgtcagacgatcggcataacttgtcgccgtatcgccggtaaaaccttgttgctccagctcttgcaaaaaattaagcaccagttgaacgacgccgggtgcctgggaaatctgtggaatcattatattgaccctttcctgcggtctgtgatgtaggtcgatacactattctttcaggctgctgcaatagcgcactgaaaggtgatgtttgtttactctatggatttcgtgttgcaggaaggcggcaagcgagtgaactccaggagcttacaatagtaagtgactggggtgaacgaacgtagccgcagcacatgcaacttgaaatacgacgagtaaatcgtttgcgtgttgcctgagttgttgtaccacatttttttctaacacgcccatcagaattaagggcagaatcggcctgttaaaaaccgctgaaattgctcatcattatgcaggtgagtttcgcgtgttcacgtcgcgtcgacgatttgacgcacaaaaaaggtgaaaagtagttatggtaaatgttcgtcagcccagggatgtcgcacaaattctgcttagcgtgctgtttttagccatcatgattgtggcatgtctgtggattgttcaaccctttattctcggctttgcatgggccggtacggtggttatcgccacctggccggtattgttacgtttgcaaaagatcatgtttggccgccgctctctcgccgttctggtgatgacgctgttattagtgatggtgtttatcatccctattgctttgctggttaacagtatcgtcgacggcagcggcccgctaattaaagccatttccagcggtgacatgacgttacccgatctggcgtggcttaataccattccggtgattggcgcgaagctgtatgcaggctggcacaacttgctggatatgggggggacggcgatcatggcgaaagtccgcccttatattggcaccaccaccacctggttcgttgggcaggcggcgcatatcgggcgctttatggtgcattgtgcgctgatgcttctcttcagtgccctgctgtactggcgcggtgaacaggtggcacaaggcattcgccattttgcaacccgtctggcaggcgttcgcggagatgccgccgtgctgctggcggcacaggctatccgcgcggtggcgctgggtgtggtggtgacggcgttagtacaggcagtgcttggcggtatcggcctcgccgtatccggcgtaccttatgcaacgttgctaacggtgttaatgatcctctcctgccttgtccagcttggcccgttgccggtactgattccggcgattatctggctctactggactggcgataccacctggggaacggtattgttagtgtggagcggtgtggttggcacgctggataacgtcatccgcccaatgttaattcgcatgggtgccgatttaccgctgatcctgattctctctggcgttattggtggtttgattgctttcgggatgatcggtctgtttattggtccggttctgttagccgtttcctggcgtctgtttgccgcgtgggtggaagaagtcccgccgccgacggaccaaccggaagaaattctcgaagaacttggcgaaatcgagaaaccgaataagtaatttctcatcaggcggctctgccgcctgattgttaaccaccgctaattgatatttgcttgctcttccccatattttcctgcttaccgccattcagctggtagtacctgtcgcaaattctttacagtttttaaactaatgagacgaatctgatcgacgcaaaaagtccgtatgcctactattagctcacggttataaatcaacatattgatttataagcatggaaatcccctgagtgaaacaacgaattgctgtgtgtagtctttgcccatctcccacgatgggcttttttttaacatttttccgcttcgctacctcgcccctcactctttccaataatgttgcacaagatactgtgactctcttcaagccgtcagcaggctgataatgttatttatattttattgtttatttcatgcagccattacacgatgaacgcttatgaactccaggcactccgccatatttttgccatgactattgatgaatgcgcgacctggattgcccagaccggtgacagtgaaagctggcgtcagtgggaaaatggcaagtgtgccattcctgatcgtgtagtcgagcaactgttggctatgcgtcagcaaagaaaaaaacatcttcatgccatcatagagaaaataaataaccgcatcggcaacaacaccatgcgttttttccccgacttaaccgcatttcaacgagtctaccctgatggcaattttattgactggaagatctatcaaagcgtagctgctgaattatatgcacacgatctggagcggctttgttaatttttccacagaaaggaattgtcgttgttacaacaataatgaacggatgctgacacaacatcgcttcactttttaaagcacctttgctaagtagaacctatgaaaaatccctatttccctaccgcacttgggttgtattttaattacctggtgcatggtatgggcgtccttttgatgagcctgaatatggccagcctggagacactttggcagactaatgccgcgggtgtcagcatagttatcagtagcctgggcattggtcgattaagtgtcttgctttttgcaggattattatccgatcgctttggtcgccgcccttttatcatgctcgggatgtgctgctatatggccttcttttttggcatcctgcagaccaataacatcattatcgcttatgtttttggctttctggcgggaatggcaaacagttttctcgatgcaggcacttatcccagtttgatggaagcttttccacgcagtcctgggacagccaatattttaattaaagcatttgtttccagcggacaatttttattaccgctaatcattagcctgttagtgtgggctgaactgtggttcggttggtcctttatgattgctgcaggcattatgtttattaacgctctgtttttataccgttgtacgttcccaccccatccgggtcgtcgcttacctgtcataaagaaaaccaccagctctacggaacatcgctgtagtattatcgatttagccagttataccttatatggctatatcagtatggcaacgttttatctggttagccagtggctggcacagtacggacaatttgttgcaggcatgagttacactatgagcatcaaactactcagtatctacaccgtgggtagcctgctttgtgtatttattaccgctccactcattcgtaataccgttcgcccaacaacattactgatgctgtacacctttatcagttttattgctctgtttaccgtctgcctgcatcccacattttatgtggtgataatatttgcttttgtcattggttttacctctgctggaggtgttgtgcaaattggcctgacgttaatggctgaacgtttcccttacgctaaaggtaaagctacagggatctattacagtgcgggcagtattgcgacctttactattccgttgattacggctcatctgtcccaaagaagtattgccgatattatgtggttcgataccgccatcgctgccatcggttttttactggcactgtttatcggcttacgcagccgcaaaaaaacgcggcatcacagcctaaaggaaaatgtcgctccgggtgggtaatgcaatattcttttcaggtcatgcaagatcttacggataaataactctttctgcgctaactaaggaaaatcgcgatcaaaaacaaactatgacatgcaatattcctggaaacataaactttatgccatgtacccagggaaaatcatcttcagtatagtaattatgtaaaccgtcggagaacaatacgtacggtaacgaaattatctttcagcaaggagctgtgaaaatgtctcaaaataaggctttcagcacgccatttatcctggctgttctttgtatttacttcagctacttcctgcacggcattagtgttattacgcttgcccaaaatatgagttctctggcggaaaagttttccactgacaacgcgggcattgcctacttaatttccggtatcggtttggggcgattgatcagtattttattcttcggtgtgatctccgataagtttggtcgtcgggcggtgatattaatggcagtaataatgtatctgctattcttctttggtattcccgcttgcccgaatttaactctcgcctacggtctggcagtgtgcgtaggtatcgctaacagtgcgctggatacgggtggctaccccgcgctcatggaatgctttccgaaagcctctggtagcgcggtcatactggttaaagcgatggtgagttttgggcaaatgttctacccaatgctggtgagctatatgttgctcaataatatctggtacggctatgggctgattattccgggtattctatttgtactgatcacgctgatgctgttgaaaagcaaattccccagccagttggtgggcgccagcgtaactaatgaattaccgcaaatgaacagcaaaccgttagtctggctggaaggtgttagtagcgtactgttcggtgtagccgcattcagcaccttttatgtgattgtggtgtggatgcccaaatatgcgatggcttttgctggtatgagtgaagctgaggcattaaaaaccatctcttattacagtatgggcagcttggtctgtgtctttatttttgccgcactactgaaaaaaatggtccggcccatctgggctaatgtatttaactctgcactggcaacaataacagcagccattatctacctgtacccttctccactggtgtgcaatgccggagcctttgttatcggtttcagtgcagctggcggcattttacagctcggcgttagcgtcatgagtgagttttttcccaaaagcaaagccaaagtcaccagtatttatatgatgatgggtggactggctaactttgttattccactgattaccggttatctgagcaacatcggcctgcaatatatcattgttctcgattttactttcgcgctgctggccctgattaccgcaattattgtttttatccgctattaccgcgttttcattattcctgaaaatgatgtgcggtttggcgagcgtaaattttgcacccggttaaacacaattaagcatagaggttaaaggagttaattatggatgttaccgcaaaatacgaattgattgggttgatggcctatcctatccgccacagtttaagccccgaaatgcagaataaagccttagaaaaagcgggattgccatttacctatatggccttcgaagtggataacgatagctttcctggagcaattgaaggattaaaagccctcaaaatgcgcggaactggtgtaagcatgccgaacaaacaactggcgtgtgaatatgttgatgaattaacaccagctgccaaactggtgggggccatcaacaccatcgttaatgatgatggctatctgcgtggctataacaccgacggcacgggccatattcgcgccattaaagagagcggttttgatatcaaaggcaaaacgatggtgctgttaggggccggtggtgccagtacggcaattggcgcgcagggggcaattgaaggtttaaaagaaattaaactctttaaccgtcgggatgagttcttcgataaagccctcgccttcgcgcagcgggttaatgaaaacaccgattgtgtcgtcacggtcaccgatctcgccgatcagcaagcctttgctgaagccctggcttccgccgacattttaaccaatggcacaaaagtgggtatgaaaccccttgagaatgaaagtttggttaatgatatcagtctgttacatccgggacttctggtcactgaatgcgtgtataacccgcatatgacgaagttattgcagcaggcgcaacaagctggttgcaaaacgattgatggatacggcatgttgttgtggcaaggggctgaacagttcacattatggactggcaaagatttccctctggaatatgttaaacaggtcatggggttcggtgcctgacaggctgaccgcgtgcagaaagggtaaaaaatgaaaaccgtaactgtaaaagatctcgtcattggtacgggcgcacctaaaatcatcgtcagcctgatggcgaaagatatcgccagcgtgaaatccgaagctctcgcctatcgtgaagcggactttgatattctggaatggcgtgtggaccactatgccgacctctccaatgtggagtctgtcatggcggcagcaaaaattctccgtgagaccatgccagaaaaaccgctgctgtttaccttccgcagtgccaaagaaggcggcgagcaggcgatttccaccgaggcttatattgcactcaatcgtgcagccatcgacagcggcctggttgatatgatcgatctggagttatttaccggtgatgatcaggttaaagaaaccgtcgcctacgcccacgcgcatgatgtgaaagtagtcatgtccaaccatgacttccataaaacgccggaagccgaagaaatcattgcccgtctgcgcaaaatgcaatccttcgacgccgatattcctaagattgcgctgatgccgcaaagtaccagcgatgtgctgacgttgcttgccgcgaccctggagatgcaggagcagtatgccgatcgtccaattatcacgatgagcatggcaaaaactggcgtaatttctcgtctggctggtgaagtatttggcagcgcggcaacttttggtgcggtaaaaaaagcgtctgcgccagggcaaatcagcgtaaatgatttgcgcacggtattaactattttacaccaggcataagcaataatatttcggcgggaacaccctccccgccgaactaaaaaatatattcaatcgtatttaataaaaatatttcgtgagtctctgtgcgctaattctccatttggcgtagggaaaatcacatctgaatcaggaattaacaatgaaacctgtaaaaccacctcgtattaatggacgagtgccggtcctgagcgcacaggaagcggtgaattatattcccgacgaagcaacactttgtgtgttaggcgctggcggcggtattctggaagccaccacgttaattactgctcttgctgataaatataaacagactcaaacaccacgtaatttaagcattattagtccaacagggcttggcgatcgcgccgaccgtggtattagtcctctggcgcaagaaggtctggtgaaatgggcattatgtggtcactggggacaaagcccgcgtatttctgaactcgcagaacaaaataaaattattgcttataactacccacaaggtgtacttacacaaaccttacgcgccgccgcagcccaccagcctggtattattagtgatattggcatcgggacatttgtcgatccacgccagcaaggcggcaaactgaatgaagtcactaaagaagacctgattaaactggtcgagtttgataacaaagaatatctctattacaaagcgattgcgccagatattgccttcattcgcgctaccacctgcgacagtgaaggctacgccacttttgaagatgaggtgatgtatctcgacgcattggttattgcccaggcggtgcacaataacggcggtattgtgatgatgcaggtgcagaaaatggttaagaaagccacgctgcatcctaaatctgtccgtattccgggttatctggtggatattgtggtggtcgatccggatcaaacccaactgtatggcggtgcaccggttaaccgctttatttctggtgacttcacccttgatgacagtaccaaacttagcctgcccctaaaccaacgtaaattagttgcgcggcgcgcattattcgaaatgcgtaaaggcgcggtggggaatgtcggcgtcggtattgctgacggcattggcctggtcgcccgagaagaaggttgtgctgatgactttattctgacggtagaaacaggtccgattggcggaattactagtcaggggatcgcctttggcgcgaacgtgaatacccgtgccattctggatatgacgtcccagtttgatttttatcacggtggcggtctggatgtttgttatttgagttttgctgaagtcgaccagcacggtaacgtcggcgtgcataaattcaatggtaaaatcatgggcaccggtggatttattgatatcagtgccactagcaagaaaatcattttctgcggcacattaactgcgggcagtttaaaaacagaaattaccgacggcaaattaaatatcgtccaggaaggacgggtgaagaaatttattcgggaactaccggaaattactttcagcggaaaaatcgctctcgagcgagggctggatgttcgttatatcactgagcgcgcagtattcacgctgaaagaagacggcctgcatttaatcgaaatcgcccctggcgtcgatttacaaaaagatattctcgacaaaatggatttcaccccagtgattagcccagaactcaaactgatggacgaaagattatttatcgatgcggcgatgggctttgtcctgcctgaagcggctcattaacaggagtataatgatggatttttctttaactgaagaacaagaactgctgctggccagtattcgcgaactgattacgactaactttccggaagagtatttccgcacctgcgatcaaaacgggacatatccgcgtgagtttatgcgggcgctggcggataacggtatttccatgcttggcgtgccggaagaatttggtggtatccctgcggattacgtcacccaaatgctggcgctgatggaagtgagtaaatgcggtgctccggcatttttaattaccaacggtcaatgtattcacagtatgcgccgtttcggttctgcagagcagctacgtaaaacggcagagagcaccctggaaacgggtgatcccgcctatgccctggcgttgacggaaccaggtgctggcagtgataacaacagtgccactaccacttacacgcgtaaaaacggcaaggtctacatcaacggacaaaaaacctttattaccggtgcgaaagagtacccgtatatgctggtgctggcgcgcgatccgcaaccgaaagatcccaaaaaagccttcaccctgtggtgggtcgactccagtaagcccggcattaagattaacccgctgcataaaatcggctggcatatgctcagcacctgcgaagtctatctcgacaacgtggaggttgaagagagcgacatggtgggcgaagaaggaatgggtttcctcaatgtgatgtacaactttgagatggagcgcctgatcaacgccgcgcgcagcaccggctttgccgaatgcgcctttgaagatgccgcccgctatgccaaccaacgtatcgcttttggtaagcccattggtcataaccagatgatccaggaaaaactggcgctgatggcgattaagatcgacaacatgcgcaacatggtgctgaaagtggcatggcaagccgatcagcatcagagtctgcgcaccagcgcggcgctggcaaaactgtactgtgcacgtaccgcaatggaagtcattgatgatgcgattcaaatcatgggcggtctgggctataccgatgaggcgcgcgtctcccgcttctggcgtgatgtccgttgtgaacgtatcggcggcggtacagacgaaattatgatttacgtagcaggtcggcagatcctgaaagactatcagaacaaataatctgcaggcggcgcagcttcttaacaaactgcgccgccagatttatccaacaagacttaccggttgaggaaattcagataggatttcttgttccgcaaaacagtttttaaattgtctacggtaatcgctggggctacaaccgacatggcgcaaaaacagtttggcaaagtgatcgacattttcataacccacacgccaggagatctctgcctgacttaattcagtattagtgagactccattttgcttccgtcatacgccgttgaataacatagttaataggggaaatacgatactctttggtaaattcatggcaaatataactgacgctggcacgaaattttttgcttaactgttctaaagtgattttttcgcgataattattattcagatagaaaagaatatcttttatcagaacatcttttttaatatacccctgctcgctacgataagcatttttaaaattttcgtagtaaagaatggctaacgtataggcaaatgcatcccataagctagatgtttggctatttttactttgcggcaaaatcacacttagctcattaaataaggtttttatgacttcttttccctgccccgcggcaattaccggacaagaatgcggttgcagtagctgattttcctcagccccctgaaactgaaagccgtacagcgcacaggtacacgtcgttgccggatcgttaacgtcagaggccaccgcatgcagcctgccgcgttctatcaccacaatgtcatccgcatgtgcgacatataagctagaatcgatggtaaaccttgcaacccctttcttgacgtaaatcaactcggtttcattgtcatgaacgtgatgtccggactcccattttggatcatcgctaaatgcaaaacgactaagccgtggcgttttaccggcgacaaacagcgtttcactggcgttatcaaaacagcgttgatacatgacaacctccctattccatgagcaagcaaaaacaatatatgccggataaaatacggcgtgtattgcggttatacaaccgcgtttagcgagagctaaacaagattatttacactgaatgcaagattgtacggtcatggaataactatattgccgcaaattgcacttttgttttagcgatcgcattttttttgcaagattgttggcaaggaaaacagcttgctccgtcgaaaaccccgcaccgctatcgcacactattttcaggccatttttaccttccatcggagatggttccgtatgcgactcacaggagaaatcatgaaaataataacctgctttaagctggtgcctgaagaacaggacattgttgtcactccagaatacaccctgaatttcgacaatgccgacgccaaaatcagccagttcgatctcaatgccattgaagctgcaagccagctcgcaacagatgacgatgagatagccgcgctgaccgttggcggcagtttgttgcagaacagcaaagtgcgcaaagacgtgctatcccgcgggccgcacagcctgtatttggtgcaggatgcgcaacttgaacatgcactgcctctcgataccgcaaaagcgctggcggcagcaattgaaaagatcggcttcgatttactgatctttggtgaaggttccggcgacctttatgcccagcaggttggcttgctggtcggagaaattctgcaacttccggtgattaatgcagtgagtgctattcagcgtcagggcaatacactggtgattgaacgcacgcttgaagatgatgttgaagttattgaactctctgttccagccgtgctctgcgtcacctccgatattaacgtgccacgcattcctagcatgaaagccattctcggcgcgggtaaaaaaccggtaaatcagtggcaggcaagtgatattgactggagccagagcgcgccacttgctgaactggtcggcattcgcgtaccgccgcaaacagaacgtaagcacatcattatcgataacgatagcccggaggccattgccgagctggcggaacatctgaagaaagccctgaactgaagcctacggagaagaaacgatgagtcaattaaacagcgtctgggtctttagcgataatcctgaacgttatgctgaactgtttggcggcgctcagcaatggggccaacaggtgtatgccattgtacaaaataccgaccaggcgcaggcagttatgccttatggtccaaaatgtctttatgttcttgcgcaaaacgacgcgctgcaacgcactgaaaattacgccgaaagcattgctgccctgctgaaagataaacaccccgctatgttgctgttggccgcgacgaaacgtggtaaagcgctggcagcacggttaagtgtgcaactgaatgcggcgctggtgaacgatgccacggcggtggatattgtcgatggtcacatttgcgccgaacaccggatgtatggcgggttagcgttcgctcaggaaaagatcaacagcccgctggcgatcattacccttgcacccggtgttcaggaaccgtgcaccagtgatacctctcatcagtgcccgacagaaacggtaccttatgttgctccgcgtcatgaaattctctgtcgcgaacgccgtgcgaaagccgcaagcagcgtggacctgagcaaagcaaaacgtgtggttggcgtcggtcgtggactggcggcgcaggatgacctaaaaatggtccacgaactggcggcggtgctgaatgctgaagtcggctgtagtcgtccaattgccgaaggcgagaactggatggagcgtgaacgttatatcggtgtctccggcgtgttgctgaaatccgatctctacctgacgctggggatctccgggcagatccagcatatggttggcggcaacggcgcaaaagtgattgtcgccatcaataaagataaaaatgcgccaatcttcaactatgccgactacggtctggtgggcgatatctacaaagtcgtccctgccctgattagccagttgagccgctaattcccctttcaaccacatctcccgctgtaaacgcagcgggaagggagcataacgcatgagcgatgacaaatttgatgccattgtggtcggtgcgggcgttgctggtagcgttgccgcactggtcatggcacgagccgggctggatgtcctggtgatagaacgcggcgacagtgccggatgtaaaaacatgaccggcgggcgtctttatgcccacacacttgaagcaatcattccaggctttgcagtaagtgcgccggtagaacgcaaggtcacacgcgagaaaatctccttcttaaccgaagaaagcgccgttaccctcgattttcaccgcgagcagccagatgttccgcaacacgcatcttataccgtattgcgtaatcgtctggacccgtggttgatggaacaagccgagcaggcgggcgcgcagtttatcccaggcgttcgcgtcgacgcgctggttcgtgaaggaaacaaggtcactggcgtgcaggctggggatgatattctcgaagcgaatgtggtgattctggctgatggcgttaacagcatgcttggccgcagcctgggaatggttcccgcttccgatccgcatcattacgctgttggtgttaaagaggttattggcctcacaccagaacagatcaacgatcgctttaatattacgggcgaggaaggtgccgcctggctgtttgccggttccccttctgacggcctgatgggcgggggatttctctataccaacaaggattccatatccttggggctggtttgtggattgggtgatatcgcccatgcgcaaaaaagcgtgccgcaaatgctggaagattttaaacaacaccccgccattcgcccgctgattagcggcggcaaactgcttgaatattccgcgcatatggtgccggaaggcggtctggcaatggtgccgcaactggttaacgagggcgtgatgatcgttggtgacgccgcaggcttctgcctgaatttgggttttacggtccgcggcatggatttagccattgcaagcgctcaggctgccgccacaacggtgatcgccgccaaagaacgcgcggatttctccgccagcagtctggcgcaatacaaacgtgagctggaacaaagctgcgtcatgcgtgatatgcagcattttcgcaagatcccggcgctgatggaaaacccgcgcctgtttagccaatacccacgaatggtagccgacatcatgaacgagatgttcaccatcgacggcaaaccaaaccagccggtacgaaaaatgatcatgggacatgcgaagaaaattgggctgatcaacttgctgaaagatggcattaagggagcaaccgcgctatgagccagaacgctacggttaacgtcgacatcaaattaggcgtcaataaattccatgttgatgagggccacccgcatatcattctggcggaaaatcccgatatcaatgaattccataaattaatgaaagcctgccctgccggactttataagcaggatgacgcaggaaacattcattttgattccgccggttgtctggagtgcggcacctgtcgggtgctgtgcggtaacactattctcgaacagtggcaatatcccgcaggcaccttcggtattgattttcgctacggctaatcatgcatcccacaggcccgcatctcgggcctgatgttctgtttcgagagtccaacatgaaagtgacattaacgtttaacgaacaacgtcgtgcggcgtatcgtcagcaagggttatggggcgatgctagcctggccgattactggcagcagaccgctcgtgcgatgccagacaaaattgccgtggtcgataatcatggtgcaagctacacctatagcgcgctcgatcacgccgcgagctgtctggcaaactggatgttagcgaagggtattgaaagtggcgatcgcatcgcatttcaactgcctggctggtgtgaatttaccgttatctatcttgcctgcctgaaaatcggtgcagtttccgtgccgctgttgccttcctggcgggaagcagaactggtgtgggtgctcaataagtgtcaggcaaaaatgttctttgcaccgacgttgtttaaacaaacgcgtccggtagatttaatcctgccgctgcaaaatcagcttccacaactacaacaaattgtcggcgtggacaaactggctcccgccacctcttccctcagtttaagtcagattatcgccgacaataccagtctgaccacggcgataacgacccacggcgatgaattagctgcggtgctgtttacctccggaaccgagggtctgccaaagggcgtgatgctaacgcataacaatattctcgccagtgagcgggcttattgcgcgcgactgaatctgacctggcaggatgtctttatgatgcctgcgccacttggtcacgcaacgggctttctgcatggcgtaacggcaccattcttaattggcgctcgcagcgtgttgttagatattttcactcctgatgcgtgtctcgcgctgcttgagcagcagcgttgcacctgtatgctcggcgcaacgccgtttgtctatgatcttttgaatgtactagagaaacaacccgcggaccttagtgcgctgcgtttctttctttgcggcggaaccacaatccccaaaaaagtggcgcgtgaatgccagcagcgcggcattaaattattaagtgtttatggttccacagaaagtagcccgcatgcggtggtgaatctcgatgatcctttgagccgctttatgcacaccgatggttacgctgccgcaggtgtagagattaaagtggtcgatgacgcacgcaagaccttaccgccaggttgcgaaggtgaagaagccagccgtggccccaatgtgtttatggggtattttgatgaacctgaattaaccgcccgtgccctggatgaagaaggctggtattacagcggcgatctctgccgtatggatgaggctggctatataaaaattaccggacgcaaaaaagatattattgtccgcggcggcgaaaatattagcagccgtgaagtggaagatattttattgcagcatcctaaaattcacgatgcctgtgtggttgcaatgtccgatgaacgtttaggtgaacgaagttgcgcttatgtcgtgctgaaagcgccgcatcatagtttaagcctggaagaggtagtggctttttttagccgtaaacgggtcgcaaaatataaatatcctgaacatatcgtggtaatcgaaaaactaccgcgaactaccagtggtaaaatacaaaagtttttgttaagaaaagatattatgcggcgtttaacgcaggatgtctgtgaagagattgaataagtttcatcttcggggatcacataaccccggcgactaaacgccgccggggatttattttatttcttcagttcagccaggcttaaccaggtttgcaccacggtgtccgggttcagagacaggctatcgatcccctcttccatcaaccatgcggcaaagtcttcgtggtcggacggaccctgaccgcaaatcccgacatatttgccctgtttcttcgcggcacggatagccatgctcagcagtgctttcaccgcatcgttgcgctcatcgaacaattcagacaccacgccggagtcacggtccagaccgagcgccagctgcgtcatatcgttactgccaatactgaagccgtcgaaatattcgaggaactgctcggccagcaaggcgttggacgggatttcacacatcatgatgattttcagcccgttctcgccacgtttcagcccctgacgcgccagttcttcaaccaccgctttcgcctgatctacggtacgcacgaacgggatcatgatctcaacgttggtcagtcccatgtcgttgcgcacacgtttcactgcttcacactccagcgcgaaacagtcgcggaagctgtcggaaacatagcggcccgcgccacggaagccgagcatcgggttctcttcatctggctcgtaacgctcaccaccgaccaggttggcatattcgttgcttttaaaatcagagagacggacaatgacgcgcttcggataaaacgcggcacccagcgtcgcgatcccttcagtcagacgaccaacgtaaaattcacgcggagaatcaaaacctttcatcatctcgcggatttcgttttgcaactgcggttcctgatcgtcaaactcaagcagtgcgcgtgggtggacgccaatcatacggttgatgataaattccagacgcgcaaggcccacgccttcgttcggtaggcaggcgaagtcgaaagcacggtccgggttaccgacgttcatcatcactttcaacggcagatccggcatcgtttctacgctggagcttttcacgctaaattccagcaactccgcatagacgtaaccggtatcaccttcggcacaagaaacagtgacgttctcaccgtctttcatccgttctgttgcatctccacagcccactaccgccggaatgcccagttcacgagcgatgatcgccgcgtgacaggtacgaccgccacggttggtgacgatggcagatgctttcttcatgatcggttcccagtccgggtcggtcatgtcagtaaccagcacgtcgccaggttcgatgcggttcatttcgctgatgtcatggatgactttcaccggacccgcaccgatgcgatgaccgatagcacggccttcggcgataatcttaccctgactatgcagcgtataacgctccatgacctgaccgcgactgcgcacggtttccggacgcgcctgcacaatgaacagtttaccggtgtggccatctttcgcccactcaatatccatcgggcgaccgtagtgtttctcaatttgtacggcctgttttgccagttcctgcacttcttcgttggtcaggctgaagatgtcacgctgttcctgcggtacgtcttcgattttaacctgcttgccgtgctcctgggtcggcgcgtaaaccatgcggatttttttgctccccatggtgcggcgcacgatagccgggcgattcgccgccagtgtcggtttatgcacgtaaaactcatccgggttaaccgcaccctgcacgaccatctcaccaaggccccatgcggaagtgataaacaccacctggtcaaagccggattcggtatcaatggagaacatcacgccagaacttgcgaggtcagagcgcaccatccgttgaacaccggcggagagcgccacaccacggtgatcgtaaccctggtgcacacgataagagatggcgcgatcgttaaacagagaagcaaatacatgtttcactgccacgagaacggcgtcaaaaccctgaacgttgaggaaggtttcctgctgaccggcaaaagaagcgtccggcatatcttctgcggtggcggaggagcgcaccgcaaaagaggcgttttcgtcatcggcggaaagctgtgcataggcttcgcggatggcgttttccagctcaggctggaagggagtgtcgataatccactggcggatttgcgcgcccgctttcgcaagctgagtaacatcgtcaatatccgttttatccagcagttcataaatgcgctggtttacgccgctttggtccagaaactggttaaacgcgtcggcggttgtggcgaaaccattcggaacggaaacacccattccggaaagattagtaatcatttcacccagggaggcatttttgcccccaaccctgtctacatcattcatgccgagttggttataccaaagcaccagcggactgctgccattgttggacatcgaacaatccttttgtgataaatgaacggtttgagaaacacatttctgcgcatttatctttgcatatttaaccggatgaaaaaaacggtgaatcgttcaagcaaatatatttttttactttttaagactgatcccagcgttgcgcaaatctgctctcttcgacaatttccacataaaccatcggtataaacgaaaccataaaaatgaaatgctgttttcataaaaaataaaattgaaggttcattttataaaccagacataacgttctacgcttctgtgcgtttttaatttatgctttcatagaattatgtctgcatcacgggaagaacaaaatggataatgctgttgatcgccacgttttttatatttctgatggtacggcaataactgcggaggtattaggacacgcagtaatgagtcaatttcccgtcactatcagcagcatcacgctgccgtttgtcgaaaatgagagccgtgcacgggcagtgaaggatcagattgacgcaatttatcaccagacaggcgtgcgcccgctggtcttctactccatcgtgttgccggagattcgcgccatcatcttgcaaagtgaaggcttttgccaggatatcgttcaggcgctggttgccccgctacaacaagagatgaaactggatccaacgccgattgctcatcgtacccatggccttaaccctaataatctcaataaatatgatgcgcgcattgcggcgattgattacaccctcgcccacgatgacggcattagcttgcgcaatctggaccaggctcaggtgatcctgctcggtgtttctcgctgtggtaaaacccccaccagtctgtatctggcaatgcagtttggtatccgcgcggcaaactacccctttattgccgacgatatggataatctggtgctacccgcgagcctcaaaccgcttcagcataaattgttcggcctgactatcgacccggaacgtctggcggcgattcgcgaggaacgtcgggagaacagtcgctatgccagccttcgtcagtgcaggatggaagtcgcggaagtggaagccttgtaccgtaaaaatcagatcccgtggattaacagtaccaattatagcgtagaagagattgccaccaagatcctcgatatcatgggccttagtcgccgaatgtactaaagaactagtgcattagcttatttttttgttatcatgctaaccacccggcgaggtgtgacacacctcgcacttgaaatcagcagcgattggtttatcgtgatgcgcatcacttcccggcagtcctgccgtagaagcaacaaatttctgagacttgtaatgaacagaactgacgaactccgtactgcgcgtattgagagcctggtaacgcccgccgaactcgcgctacggtatcccgtaacgcctggcgtcgccacccatgtcaccgactcccgccgcagaattgaaaaaatactgaatggtgaagataagcgactgttggtcattattggcccctgcagcatccacgatctcaccgctgcaatggagtacgccacccgtctgcagagcctgcgcaaccagtaccagagtcggctggaaatcgtaatgcgcacctattttgaaaaaccacgaactgttgtcggctggaaaggactaatctccgatccagatttaaacggcagctatcgggtaaatcacggtctggagctggcgcgcaaattacttttacaggtaaatgagctgggcgtcccaaccgcgaccgagttcctcgatatggtgaccggtcagtttattgctgatttaatcagttggggcgcgattggcgcacgtactaccgaaagtcagatccaccgcgaaatggctagcgcactctcctgtccggtaggttttaaaaatggtaccgatggcaatacgcggattgctgtggatgctatccgcgcagcccgcgccagccatatgttcctcagcccagacaaaaatggtcagatgaccatctatcagaccagcggcaacccgtatggccacattattatgcgtggcggcaaaaaaccgaattatcatgccgatgatatcgccgcagcctgcgatacgctgcacgagtttgatttacctgaacatctggtggtggatttcagccacggtaactgccagaagcagcaccgtcgccagttagaagtttgtgaggatatttgtcagcaaatccgcaatggctctacggcgattgctggaattatggcggaaagtttcctgcgcgaaggaacgcaaaaaatcgtcggcagtcagccgctcacttacggtcaatccattaccgacccgtgtctgggctgggaggataccgaacgcctggtcgaaaaactcgcctctgcggtagatacccgcttctgaatgcgtgcccattcctgacggaatgggcatttctgcgcaacttgttgtcttctcaacaaattactgcttgctctggtcagccataatattgataataagaatcattgttatatcaattattattaatttttatgcgttatacggatagcagaaaactcacgcctgaaacggatgccaatcacaagaccgcttccccgcagcctattcggcgaatttccagccagacactgttaggtccggatggcaaactgattatcgatcatgacgggcaagaatatctgctccgtaaaactcaggctggcaagctgctgttgaccaagtaacctttaactgctgcagctgacttccagccgtttaccccagtcaggtggacgactgacatagtcatcatctctgtcgctgaaaggatttcgcaacgcctcatgcaggcggtgcaattccgtcatatcacccttttctgccgcttcaatcgcccgttgcgccaaccagttgcgcaataccagagcggggttaacgctttgcatcagttgctgacgctcactatcgctaacctcgtcttgttgcaaacgcccccgataacgggcaaaccagtcatcaaatgccgcacgatcaataaactcatcacgtagcggactcgccgcgctgtgctgctcggtcagactcagcatgcggaatgtgcgggtataatcgctgcgctctcgcgccatcagactgaataattcattcagtagcgcgttatcctctttttgctccgtcatgaagcccagtttctgccgcatccgttctccataatgcgtcaacaaaacctgctgatagctgtccagggcctcattcagggcatctacggcaacaaatgggctcaatgtctgcgccagacgctgtaaattccacaacgcgacggcaggttgattatcaaagctgtaacgcccttgatgatcgctgtgattacaaataaaaccgggttcgtaatcatcaagaaaaccaaacggcccgtaatcaagcgtcagccccagcaggctcatgttgtcggtattcatcaccccatgagcaaagccgaccgtctgccattgggcaattaagctcgcggtacgtgcgacaacatcgctaaaccagagacggtatttgtcctcatcatctgcaagatgactccagtaatgacgaatagcaaagtcagctaactgacgaaccttttcgctctcgcggcggtagtaaaaatgttcgaaatgaccaaagcgcagatgacttggtgccacacgcatcagcatcgcgcctggctccgccgtttcccgatacactgggctatcgctggtgacgatacttaacgcgcgggtcgtcggaatgcccagataatgcatcgcctcactggcgagactttctcgtatcgtgctacgtaaaaccgcccgtccatcacccattcggctataaggcgtcaggccagcacctttcagatgccagtccattgtagtgccatcagcaagcagttgttcgccgagtaaaatgccgcgcccatcacccagttggcccgcccagacgccgaactgatgaccactgtaaacctgcgccagtggactcataccaggcagtagggcttcgccgccccagacacctgcgccatttttaaacaggctgcttggaatactcagcgtgttagccagttcggtattatgccaaatcagccgggcattatttaaaggcgtaggggaaagtgctgtataggtttctggcaattcatcgcgccagcgggtaacaaaagacagggtcatagatcctcctgtttgatagtgtagacggttactctcgtcttaaacaccagcaaacagaagggttatcgctgaaccaacgtcgttatctgatttatgggaacggcaggccacaggcatccctggagagcatggaaatcgaagggggtaatctgtgccaatatttctgccgtatcaatgcctcccgcaatgatgcaattgcaacaaggggaaatttgcgcctggatcgcacgaataaacggttcgaaggagcggtgcgtgatttgttgctgaataaaacttttatccagcatgacgcgggtgaaaagaccatcaaaaaccgctttcattgtgctattgcctgctcccaaattacctaacacaaggggatacacttggcttaaggataaaagaccgcgattatcttttccttcattgagatgcgggtaattctcattaatcaacagttcaataaacggatattttaatagttcgcctgcgtaattatccctctctaataataatgtagccacttgtggcgttaaattaagccaggcaaagagtttatgttgaataaaaaaatgttggcaactttttagtaattccaactgctcactaaataattgccaatgttgctcctcggtaagttgcgctataacccgactcgtcgggatacgaaccgtaccatcttcactggagaaatgggtaattaactcaacgccgacaaggacttgctggttgtctcttatcggcaggaaatagcaatcagaatgataaagattctccaaaaaaatcttcatggtaaccgtccctctcgaaggatgtttttcagtatccggctaaaagggatgaggccataagacataacaattacagaaggagtaactttcatttgttccatgttaaccactttttcaggggtcctttttttagattatcctgattataaacgaataatccatttacggaatttttgtctgcaaaatactactgtattcaggagtaaatggacggcgatgtatcatcgccgtccatttttcgacatattagattcgtctcgcctgccagaaatttttctgccaatagacattatcaagactggaacgcatcactcccttgctggtagaggcgtggataaattggttgttggtatcgtaaatacctacatgcaaaccattttgtccggaccccgttttgaaaaagaccaggtcacctggcagcaactcgtctttatcaatttgcgtgccaatagaggcttgttgtttggtttcacggggcagctgcaaatcgaaacgatcgcgcatcgtcacaaccacaaatccgctacagtccacaccgcgccgcgtcatgccaccataacgatacggcgtgccatgccagctttgtagctggtcgttcaaaccggcaataacggtaatgctatcagaaagtctggcatttggcggcggtgctttatggtggctacacccggccagaagcagtgctgtgatcaaaataaggcagaaacgcattccgtacggttcctctgttttttattcttgcattaatttagcgtcgtaattacccgattttcaagatactaatgaaatcagatggtgctaatcagcattctgtgaccttcgatatccagacggcgaaaattcatcccataggcctgcgccagatttggcggcgtgagcacctcttccctgcgtccactggccagcatttttccaccttttagcaaccacgcccgatgcgcatgacgcaatgtgtggttgagatcgtgactgctcatcacaatcgccagtccttgctgacacagcgcgctcagaattttgtctaacgcactttgttgcgcaacatcaagactgttcatcggctcatcaagaagcagcaattggcctgcgggattggcttgtggtgtgatttgcaacaccaccgcagcaagacgtacgcgttgccattcaccgccggaaagttgattggtgctacgtccgagtttgtcatcaagagccagcgcccctgcgacatcattcagtagttcggtacgcgttttatcgtgctgatgcagtgtcaggtagtgccagaccggcgttgcaaacggcggcgtctgctgttgactaagataggcgcgatgcagcgcgagttttgttgcggaccatgcttccagtggttgccccgcgaactgaatgcttcccttaccgctggtcattccggccattcgcgccagtaaggtactcttacccgcgccattcggccccaccaggtgcaggatctccccagcccgaacctcgccagaaagcggccccaggcgggtagattccgcaacatcttgtaactgcatcacaatagacattattttgccaacgccagtttaatgctttccatcacaatgggatcttccggcgtcatatccggggaaaaacgctggatgacttttccgtccctgccaaccaggaatttttcaaaattccataaaatatcatccgggtacagcggtgcacggcctttgctgaccatacgggcatagaatccgctctcttccggcgcgactgcggtcggcgctgcggcaatcaatttttgatacagcggatggcgtccttcgccattaacttcaatcttactgaacatcgggaacgtcaccccccatgtggtggtacagtaagttttaatctcttcatcgctgcccggttcttgttccagaaactggttgcacgggaatcccagcaccataaaacctcgatcgacccaggctttctgaatattctccaactgctcatattgcggcgttaagccacacttactggcgacattgacaatcaacagcacattaccggcgaacttctccagcgtggtcacttcaccgtcgatatctttcactacggtcgtcagaatggaatcttgcatcgtttctcctgggtgtggtcagtaaaaatcttagcttttaatcatagaccgtctttttgcggttaacgtcctgcttttaacaataaccagataaacaccggcgcacctaacgttgcggtgaccacgccaataggcagctctgcggcagctaatgccaggcgcgctacaatatcggccagcagcaatgcgctcgcccctgccagcgcgcagccgggaagtaatacgcgatgatcggttaaaccacacaaccggagaatatgggggatcaccagaccaataaagccgatagcacccgccagcgccacactgacgccaaccatccagccggtcgctgccaccagcacattgcgccagaaccacaggggtaaacccagttgccgcgcgctgatctcgccaagtgctaacatattcatcggcctggactgacaacagatccacaacaacacggggatcaatgccagcatcagccagctttgccgccagtctacgccgccaaaaccgcccatcatccagtacatcagctgacgcaaatcaacactggtggaaaagtagatagcccacgtcattagtgcgctacagataatccctaatgcaacgccagccagcaataaccgactggtgctaagatgacgacgggcgaaacgtaagagtattaaagtgatgataagcgcgccagcaatcgcacacagccctagcgcccagttggggagttgcccttgcccaagcaataccgcggcgataagccccacgcctgcgccgttagagacgccaagtagtccaggttctgccagaggattttcaaacaacgcctgcattacagcgccggatatagccagcgccgcaccaaccagcaatacagccagcgtacgtggcaggcgaatttgccagacgaacagttcgccacgaggagtaaaccagtcacctgggctgatccattgttcaccggcgcaaaggcttaagagaagcgccagcagcatcaaaacactcaggcataataaccagcgaatattttgtcgctgttgttggcgggcaagtgtcagcatggtatccgttctgctgaagtgtcatggcgttgattttacggtgactcttcgacagtgaaaagaaaaaaggccgcagagcggcctttttagttagatcagattactcgtctttggggctagcgttttcgacccggctttttaacttctgcccgggtctgaaggtcaccacgcgccgtgctgtaatgggaatatcctcgcccgttttcgggttacgtcccgggcgttgattcttatcacgcagatcgaagttaccaaaaccagagagtttcacctgttcgccgttttccagagcgcgacggatctcttcgaaaaacagttcaaccagttctttggcatcccgcttgctaagcccaagcttatcaaacagatattcactcatttcagcttttgtaagcgccataggttcaatccctcaaacttgcctggaatcgctcttttaatgcctctacacatttggcgacggtagcggcaatctcctcttcttcgagtgtacggctggtatcttgcaggatcaggcttatggcgaggctcttatacccctccgcaacacccttaccgcggtacacgtcaaataagtttacgccaactacctgatttacgccaactttcttacattcggataaaatatccgctgcgggaacgttttctgcgaccaccaccgcgatgtcacgacggttcgccgggaagcgagaaatctcgcgcgcctgaggcaccacgcggtctgcgagcttgttccactccagttcgaacaccagagtgcgaccgttaagatccagtttacgttccagttcaggatgaacaaccccaacaaaaccaatacgttcacctttcagataaatcgctgcggattgccccggatgcagtgccggattcgcttctgcacggaactcaacctcattcagtttaccggtcaggtcgagaacggattcaagatcgcctttcaaatcatagaaatcaacggtctcttttgccaggttccagtgctcttcgtaacggttaccgcaaatcacaccggctaacatcagatcctgacgaatgcccaacggtgcctgagtatctggtacgaaacgcagaccgctttcgaaaatgcgcacacggttctgctgacggttctggttgtacaccacggttgccagcaggccagtccacagagaaagacgcattgcactcatttcaacagagatcgggcttggcagcagtaaggcttcaacgcctggatggatcatctgctgcactttcggatcaacgaagctgtaggtgatcacttcctgatagcctttgtcgttgagcagcgttttcacgcgcttgaggctcaggtcagcttcacggtgagtacccataatcaggcttgcctgtaccggctcatccgggatgttgttgtagccgtaaacacgcgcgacttcttcaaccagatcttcttcaatctccatatcgaaacgccagctcggcgcaactgcctgccattcgtctttgccttcggtcacttcgcagccgagacgacgcagaatgtcagttacctgctcatccgcaatatgatggccgatcaggcgatccagtttgctacgacgtagagtgatggttgcacgcttcggcagcgttgcttcgttggtgatatcaattaccgggccagcctcaccaccgcagatgtcgatcagcagacgggtcgcacgttccatcgctttgtgctgcagtgccggatcaacgccacgctcataacggtgagacgcatcggtatgcaggccatgacgacgagcacgaccggtgatagacagcgggctaaagaacgcgcattccagcagcacgttttgtgtttcgtcattcacgccagagtgttcgccaccgaagatgccgcccatcgccagcgccttgttgtggtcggcgatgaccagagtgtcagcattcagcttcgcttcagtaccgtcgagcagcaccagcgtttcgccctctttcgccatccgcaccacaatgccgccttcaatgcgatctttatcgaaagcgtgcatcggctggcccagttcgagcagcacatagttggtgacgtcaacaactgcatcgatagaacggatcccgcaacgacgcagtttttctttcatccacagcggagttggcgctttaacgttaatgccttttaccacacggccaagataacgcgggcaggcttccggcgcttcgactgtaatcggcagcgtgtcgtcgatggtcgcaccaaccggaacgatttccggttgaaccagcggcagctggttcagcacggcaacgtcacgcgcaacaccaatgatgcctaagcagtcggcacggtttggcgtcacgctgatttcgatggtgttgtcatcaagtttcaggtattcacggatatcggtgccaatcggcgcatccgcaggcagttcgataatgccgctgtgatcgtcagaaatgcccagttcagagaaggagcacagcatcccttcagacggttcgccacgcagtttcgccgctttaattttgaaatcacccggcagaacagcaccaatggtcgctaccgctacacgcaggccctgacggcagtttggcgcaccgcagacgatgtccagcaggcgatcgccgccgacattcacttttgtcacacgcagtttgtcagcgttcggatgctgcgcacactcaaccacttcaccaacgaccacgccgtggaagctgccggcaaccggttctacaccgtcaacttccaggcccgccatagtgatttgatttgccagcgcatcgctatcaatcgccgggttcacccattcgcgtaaccacagttcactgaatttcataatctattcctgccttatttaaactgtttgaggaaacgcagatcgttttcgaagaaactacgcaggtcggtgacgccgtaacgcaacatagtcagacgctccatccccatcccgaaggcgaaaccagagtaaacttccgggtcgatgccaacgttacgcaacacgttcggatgcaccatcccgcagcccagcacttccagccatttaccgtttttacccatgacgtccacttctgcagaaggttcggtaaacgggaagtaggaaggacggaagcgaatctgcaaatcttcctcaaagaagttacgcaggaagtcgtgcagcgtgcctttcaggttggtaaagctgatgttggtatcaacaatcagaccttccatctgatggaacatcggcgtgtgagtctggtcgtagtcgttacgataaacacggccaggcgcgatgatacgaatcggtggctgctgggctttcatggtgcggatctgtacgccagaggtctgggtacgcagcaggcgggtagtgtcaaaccagaaagtgtcgtggtcagcgcgcgccgggtggtgaccaggaatgttcagagcatcgaagttatgataatcgtcttcgatttccggcccggttgccacggtaaagccaagctcaccgaagaaactttcgatacggtcgatggtacgggtaaccggatgcagaccgccgttttcaatgcgacgacctggcagagagacatcaatcgtttccgccgccagacgcgcattcagtgcagcgctttccagttccgctttacgcgcattcagcgcctgctgaacctgctctttcgcttcgttgataaccgcaccagctgccggacgctcttctggcggcagctcacgcagggtcgtcatctgaagggttaagtgcccttttttacccaaatattcgacgcgcacattatctaacgcggcaacatcactcgcctggctaatggccgccttcgcactggcaaccagttctgcgagatgactcatggttttcctcattgtgtcagtggtgacactggttcgttggacttagagcctatcccatcaggctattttacttgccattttggtcccgggctgtgctcgaaattctcacgtacttaaatacgctccggtttctccgcgctggccgtgtccagtctggctgcgacaattacacctgatgagacaggctttttatttttcaaaacgcgcatacaaaaaaagcctccactgggaggctttcaggcgctgttttccgtttctcttctcacgcgctagcctcctggattcaggtgctaaagtaaaaaaagaagcggaaaatagcagcattcattgcttgcgttaccttttggtactcttcaaaagacctttattgaaaaggctacggcgataaaagtcaatgttttgatggcgttgaaacgaaaagagggagactagctccctctttcaactggcttatgccagagctgctttcgctttttcaaccagagcggtgaacgctactttgtcgaatactgcgatatcagccaggatcttacggtcgatttcaacagaggcttttttcaggccattgatgaatttgctgtaagaaataccgttctgacgtgctgctgcgttgatacgcgcaatccacagttgacggaactgacgcttacgttgacgacggtcacggtaagcatactgaccagctttgataacagcctggaaggcaacgcggtatacgcgagaacgcgcaccgtagtagcctttagcttgtttcaaaattttcttgtgacgtgcacgtgcaataacaccacgttttacgcgagccatatgtgctctcctgtatctatattctaattaaaaagttaaaaacgttaacggcttatgcgtacggcaggcacgcgattaccaggcccagatcgcctttggaaaccatggctttcggacgcaggtgacgtttacgtttggtcgcttttttggtcagaatgtgacgcaggttagcgtgcttgtgcttaaaaccacctttaccggtttttttgaagcgcttagcagcaccgcgtacggtcttaatttttggcattttaataacttccacttcgcattgttaataaacgaaacaaaggcgaacaaagcctgtgaagcccgaaggctccacagacagtgctacttgaaggccttactgtttcttcttaggagcgagcaccatgatcatctggcggccttcgatcttcgttgggaaggattcgaccactgccagttcttgcaaatcgtctttcacgcgattaagcacttccataccgatttgctggtgcgccatctcacgaccgcggaaacgcagcgtgattttggctttatcaccctcttcgagaaagcgaatcaggctgcggagttttacctgatagtcgccttcatctgtaccaggacggaatttaatttccttaacctggataactttttgctttttcttctgttccttagaagacttgctcttttcatagaggaatttgccgtaatccattatacgacaaaccggcggctcggcgttagggctgatctcgactaagtctactccggcttcttctgctttctccagagcttctctcagactcacaataccaagctgctcgccttccagacctgttaagcgaacttcctgggcgcgaatttcgccattgatacggttagggcgcgccgtttgaactcgttttccgcctttaataccttattcctccaattgtttaagactgcggctgcgaatctcttgttgcagcttctcgatcacttcatttacgtccatgcttcccaggtctttaccacggcgggtgcgaacggtaactttgccactttccacctctttatcaccacagaccagcatatatgggacgcgacgcaaagtgtgctcgcggattttaaagccaatcttctcatttctcaagtctgctttaacacgaatgcccgcattacttagtttttgcgtcaattcgttaacgtattcagactgactatcggtaatattcatgataacaacctgaaccggcgcaagccaggtcgggaagaaaccagcgaactcttcggtcaggataccgatgaaacgttccatgctccccagaattgcgcggtgaatcattaccggtactttacgttcattgtcttcgcctacataagaagcgctcagacgagacggcaaagagaagtccagctgtactgtaccgcactgccatgcacgatcgaggcagtcatacagggtaaattcaattttcggaccgtagaaagcgccttcacccagttgatattcaaacgggatgttgttttcttccagcgcaaccgccaggtccgcctcagcacgatcccacatttcgtcgctgccaatacgtttttcaggacgagtggagagtttgacgacgatcttctcgaagccaaaagtgctgtacatatcatagactaaacggatacatccgttaacttcatcgcgaatttgttcttcagtacagaagatatgcgcgtcatcctgggtaaatccacgcacgcgcatcaggccatgcaggctaccactcggctcgttacggtggcagctaccaaactcggccatacgcagcggcagatcgcgataagacttcagcccctggttgaaaatttgtacgtgacccgggcagttcatcggcttaatgcagtattcacggttctcagaagatgtggtgaacattgcatctttgtagttgtcccagtgaccggttttttcccacaggacacggtccatcatgaacggacctttaacttcctgatactggtactctttcagtttagaacgaacaaacacttccagttcacggaagatggtccagccgtcgttgtgccagaataccatacccggcgcttcttcctgcatatggtacaggtcgagctgtttaccgattttacggtggtcgcgtttcgcggcttcttccaggcgctgcaggtaagcgttaagtgcttttttgtctgcccacgccgtaccgtaaatacgttgcaacattttgttgttgctgtcgccacgccagtaagcccctgccgttttcattagtttgaaatgatggcagaaacgcatgttcggtacgtgcggaccgcggcacatatcgacatattcttcatggaagtacagacctggcttgtcatcatgggcgatgttttcgtcaagaatggagactttgtagctctccccacggttggcgaaagtttcacgcgcttcgtgccagctgactttcttcttaatgacgtcgtagtttttctcagcaagctcatgcatccgcttctcgagtgcttcgacatcttcctgggttaacgtgcggtcaagatcaacgtcgtaataaaaaccgttgtcaataaccgggccgattgccattttggtatgcggccaaagttgtttaatcgcgtgccctaacaggtgcgcacaggagtgacgaatgatctccagaccttcttcgtctttggcggtaatgatgctcagttgtgcgtcgttttcaatcagatcgcaagcatcaaccagttcgccattaacgcgccctgcgatacaggctttcgccagacctggaccaatgtccagcgcaacatccatggggcttacagcgtgatcgtaatggcgttggctgccatcaggaagagttataacaggcattttatatccttatttgcagtggtgacccacacgaaagatcacatacaaagaaaaatttgtttattaacagttcattgcgaaaccatctagccaacaaatgctaaattggttcgcaatcaggtacacaaatgaaagacattaacctctcaccttccacccggttgagcgatgttaacactaaaaaaagggagattgtacctttccgtttcacattgattcgattcgcaattcgtttgtagtgagtacaccagcaaaacgcttaaagaacaactgataacatcacggtgcgtctgaaaggtttactgcgagcggatttacagcagcataaactgaatccagcaaagttcgttgcgtgatttggcggtagtattttaaacgctcatgagattaatgacgaagtggtcatatcacaatgataaaagtgacacaattcttataacaatttttcgtgcacatttcgttctggcgataataattaatcatcatcctcaaaacctccagatatatataaggcgaacagattatgagtcaaaacgatatcattatcagaactcattataagtctcctcatagattgcacatcgatagcgacataccaacaccttcatcagagcctattaatcaatttgcgcgccagctcatcaccctacttgatacctctgacttaagttcgatgctgtcatactgtgttactcaggaatttaccgcaaactgtcgaaaaatatcacaaaattgttattccactgccctttttaccattaactttgccacttcacccatccatacagaaaatatactcattacattacactataaaaaagaaatcatttccttattactggaaaccacgcctattaaagctaaccatttgcgaagcatactggattatattgaacaggaacagttaactgctgaagatcgtaaccattgtatgaaactgtctaaaaaaatccatagagaaaaaaactatacacccaacagtaaatctcaatggtagtgcatgttttttgcaatctccttctgacgctattttttgtcgccatctgtcattgcaatacgcccttgattcattgagaaatggaaaaggcaaagtcaacctgattaaacattactcctccgttgaatccatacagcagcatgtccccttagtccgggacgcggagttcagagcattacttcgccatcctcctgcagggagtcgcgttatcgcgagtaaggattttggcttcgctttagatattttcttttgtcgaatgatggcaaacaatgtcagtcatatgtccgcgattttatatatagacaatcatactttgtcagtaaggctacgaataaagcagtcagtgtatggacaattaaattatgttgtgtccgtttacgacccgaacgataccaacgttgccgtcagagacacccacaggacagcacggggctttctttcgcttgataagttcatcagttcaggtcccgatgctcagacctgggctgatagatatgttcgcaactgtgcaattgctattctgcccctattacctgtgggagttccaggggctattttcgcgggtattgcatcacgaatgccatttgcccctatacatccatcggcaatgttgttaataatggctacaggccagtctcaacagcttattacattattcaaacagttgcccatactccctgaaaaagaaatcattgaaataataactgcgcagaatagcgttggtacacctgctttatttttggctatgatgaacggacatactgacaacgtgaaaatatttatgcaagaaattcagtcactggtagataatcacatcattcatgaagataatctggttaaattactgcaaactaaaagtgctaacgaaacacctggactttatatctccatgttgtatggattcgatgaaataatcgatatctttctgaatgcattaaccactccaatagcacaagagcttttaaacaaaaaactggtgatgagtattttagccatgaaaatacatgatggtgagccaggattatacgccgcaatggaaaataatcaccctttgtgtgtcacacggttcctctctaaaattaatggcatcgcctttaaatacaagttgagcaaagctaacatcatggatttattaaaaggagctacagcacagggaacccctgcattatacatcgccatgagcaagggtaatgaagacgtcgtgttatcttatatatcgacgctgggtgcttttgcaaaaaaacattcttttagtcaacatcagttatttacactattggccgctaaaaatcatgacaacatgtcagctgttcatatagccattcatcataagcattataaaactgtagaaacatattatgctgctattaatgcaatcagccaaagcctgagttttagtgctgatgaaataaagacgtatttataaccagctatttacgatatatatcgatacataattttatttttttcataaaacgcagaaacagtgaccatgtgcacaacgccacccgacggctgtaataacaaaaaatcccttgatgcctgtcccttttgttacactccgttatcacgcacaagagatatgcaggacactggtatgccgactaaacgctttgataaaaaacactggaagatggtggtggtgctactggcaatctgtggcgctatgttgttgctacgttgggcagcaatgatttggggctgagcagtgacaaacgaagacagccagaccgcataacacggtccggcagataattttacatgctgtagcccaggcttaaggttgtccgacggtcggtatgttccggtgcagactctggaggttcagagttccatgtgacgttgtaagccaccttcagtccaaaatgttcattaatagcaacatttaatgcgctttcggagttcagcgttgtgtcttccgcgccaaagacgctaacaccctgcgtaaatttagcgttgtcagtcaactgccatgcataagccccggaggcatagcccagcggctgggtttcactggcattgtcggtatatttgtcgtaacgcacacctggaccgaattcaaagcggaaactgtgtaccgggccattcaaaaactgacgaccataacccgcggtcaacacatcgcgctctcgatagccgttataacggtctgtcagccagcttgcctgaccaaataaatagtcataatcagttaaattaaaacggctacgcccgcccgccgcatatttttcactagaacgctcatcattagaagaagtattactggcgttcccccacaggctccaggcagtggtgtgtccataccaggtcatggtggtgtcagccgtaagactggagcttttcgtattgccactttgtgcaagatatcctgcgttcagattaccttcgaaaggttttttagcgctggcaggatcatccatgacagtaaaaacggaatcatcggcagctgcattcagactcgcaaacatgccccccgccaacataacgatggcaggaactgtcttcaaaagcttcatttatcaagagtccgtacaacaaaaaaagagaccatcgcggtcccggaaactttcttaaggatcaaagattagcgtccctggaaaggtaacgaattataaaaaggcgcgaataacttagcaatgtattcttatttcattttttgaataagcatgtggcgaaaacagatttttatttatatatatttatctgcaaaattttaaataaagctccaataaatcatattgttaatttcttcactttccgctgattcggtgccagactgaaatcagcctataggaggaaatgatggtacgtatctatacgttgacacttgcgccctctctcgatagcgcaacaattaccccgcaaatttatcccgaaggaaaactgcgctgtaccgcaccggtgttcgaacccgggggcggcggcatcaacgtcgcccgcgccattgcccatcttggaggcagtgccacagcgatcttcccggcgggtggcgcgaccggcgaacacctggttagtctgttggcggatgaaaatgtccccgtcgctactgtagaagccaaagactggacccggcagaatttacacgtacatgtggaagcaagcggtgagcagtatcgttttgttatgccaggcgcggcattaaatgaagatgagtttcgccagcttgaagagcaagttctggaaattgaatccggggccatcctggtcataagcggaagcctgccgccaggtgtgaagctggaaaaattaacccaactgatttccgctgcgcaaaaacaagggatccgctgcatcgtcgacagttctggcgaagcgttaagtgcagcactggcaattggtaacatcgagttggttaagcctaaccaaaaagaactcagtgcgctggtgaatcgcgaactcacccagccggacgatgtccgcaaagccgcgcaggaaatcgttaatagcggcaaggccaaacgggttgtcgtttccctgggtccacaaggagcgctgggtgttgatagtgaaaactgtattcaggtggtgccaccaccggtgaaaagccagagtaccgttggcgctggtgacagcatggtcggcgcgatgacactgaaactggcagaaaatgcctctcttgaagagatggttcgttttggcgtagctgcggggagtgcagccacactcaatcagggaacacgtctgtgctcccatgacgatacgcaaaaaatttacgcttacctttcccgctaacaaaaacattcccccagcattgggggaatcatcaccaacctgtcggcaacgcgtttctccgactatgctcaaaagtcatgtgataacaaaggggtgaactatggccagtggcgatcttgtccgttatgtcataaccgtcatgttgcatgaggatacattgactgaaattaacgagttgaataattacctgactcgcgacggttttttgctcactatgacggatgatgagggaaatatccatgagctgggaactaacacttttggacttatcagtacccaaagtgaagaagaaattagagaactggttagcgggcttacccaaagtgcaaccggcaaagatcctgaaatcaccatcacgacctgggaggaatggaatagcaacagaaaataaatggtttttgggcaataatcagtctgtggtgtgcgttagctcgtgtttttacaccgcattcttgcgctaaccttatgatctggcagacaacatgggagagacatcatgtggcaggcaatcagtcgtcttttgagcgagcagttaggtgaaggcgaaatcgaactgcgtaatgaactgcctggcggagaagtccatgccgcatggcatttgcgctatgcaggacatgattttttcgtcaaatgtgatgaaagggaactgcttcccggttttaccgccgaagccgaccaactggagttactgagccgtagtaaaaccgtcaccgtgcctaaggtttgggcagttggcgctgaccgtgactacagttttctggtgatggattatctcccacctcgtccgctggatgcgcatagcgcatttattcttggtcagcaaattgcgcgtttacatcaatggagcgaccaaccacaatttggccttgatttcgataacgcgctctccacaactccacagcccaacacctggcaacgtcgctggagtacgttttttgctgaacaacggattggctggcagttggaactggctgcagaaaaagggatcgctttcggcaatatcgacgccatcgtcgagcatattcagcagcgtctggccagtcatcaaccgcagccttctctgttgcacggcgatttatggtccggcaactgtgcactgggtccggatggcccgtacattttcgacccggcctgctactggggtgaccgagagtgcgacctggcgatgttaccgctgcatactgaacagccgccacaaatctatgacggctatcagagtgtatccccgctacctgccgatttccttgaacgtcaaccggtttaccaactctacacgctgttaaatcgtgcaaggttatttggcggtcagcatttggttattgctcagcagagtttggatagattattagcagcatgatatgggttgaggataatggccgctccgtgcggccttttgattaaataaacccaagcagagaaaagaacacataacctgcagcaatacaaataaccggcaggatatacagactgaaaaactgcaggaaaatagtatggtgcggaacaacaatacgggactcaatttgttcacgcgttagcccctcttcccctttggctttttccagaatgagttgatcttcaacaccttcccgcaagaagcgcgcctggcgactcatccgggcaccggaatcctgcaacgccagtccgacaaaaatcaggatgaaaatcacccagaacataacgttcacgccaccattaaaattgggcgtcggggagttataccagaatagattcaaaaaaggcgtattcgcctgcatcatatcgatcatgacatgagtaaagtcgagcatgaccgcattaatgccttccttgttttcctgccgggtattcataaatttcagcaaagaaatcaatgtagagatcaatgcaggtataaaaatcacccaacccaaaatccttttcaaaacagcaatgcgtccagcttgttgatacgtcatgagttctccttgattaagacgcgtcgtttcacttagtttacctgtagatatctgttttcgcccattctttaaaggcgatatgataggcgcttaatcataagcacggcttaataccttacacataatgctctaaaggagaggttgtaatgagtaccccgcgtcagattcttgctgcaatttttgatatggatggattacttatcgacagtgaacctttatgggatcgagccgaactggatgtgatggcaagcctgggggtggatatctcccgtcgtaacgagctgccggacaccttaggtttacgcatcgatatggtggtcgatctttggtacgcccggcaaccgtggaatgggccaagccgtcaggaagtagtagaacgggttattgcccgtgccattagtctggttgaagagacacgtccattattaccaggcgtgcgcgaagccgttgcgttatgcaaagaacaaggtttattggtgggactggcctccgcgagtccactacatatgctggaaaaagtgttgaccatgtttgacttacgcgacagtttcgatgccctcgccagcgccgaaaaactgccttacagcaagccgcatccgcaagtatatctcgactgcgcagcaaaactgggcgttgaccctctgacctgcgtagcgctggaagatagcgtaaatggcatgatcgcctctaaagcagcccgcatgcgttccatcgtcgttcctgcgccagaagcgcaaaatgatccacgttttgtattagcagacgtcaaacttagtagcctgacagaactcaccgcaaaagaccttctcggttaatgaccaggggcagtgatctcgctgcccctggttctttatctgaaattgcattcaactgacggattaatcgtcaatttaagagaaagagttacaccgtcaccacttccgtgcactgtataaaaatcctatactgtacgtatcgacagtttagtgagttttatcatgacggcggaaggtcaccttctcttttctattgcttgtgcggtatttgccaaaaatgccgagctgacgcccgtgctggcacagggtgactggtggcatattgtcccttccgcaatcctgacgtgtttgttaccggacatcgatcacccaaagagctttcttgggcagcgattaaaatggataagtaaaccgatcgcccgcgcttttgggcatcgtggttttacccacagtctgctggcggtatttgcgctgctggcaaccttttaccttaaggttccggaaggctggttcattccggctgatgcgctacaaggaatggtgctgggttatttgagccacatacttgccgatatgctgacacccgccggtgttcccctgctctggccatgccgctggcgtttccgcttgcctatcctggttccccaaaagggcaaccaactggaacgttttatctgcatggcattatttgtctggagcgtatggatgccccatagtttacccgagaacagcgctgttcgttggagtagccaaatgatcaataccttgcagatccagtttcatcggcttattaagcatcaggttgaatactaaaaaggcaaaaatcacctttctggaataagcaattccatttgaatataagagccagctcacagttctgttaatcttgcgccaacactatgactgctacgcagtgatagaaataataagatcaggagaacggggatgaactttccattaattgcgaacatcgtggtgttcgttgtactgctgtttgcgctggctcagacccgccataaacagtggagtctggcgaaaaaagtgctggtgggtctggtgatgggtgtggtttttggccttgccctgcataccatttatggttctgacagccaggtacttaaagattctgtacagtggtttaacatcgttggtaacggctatgttcaactgctgcaaatgatcgttatgccgttagtcttcgcctctattctgagcgcggttgcccgtctgcataacgcatctcagttaggcaaaatcagttttctgaccatcggtacgcttttgtttaccacgctgattgcggcgctggtcggtgtgctggtcaccaacctgtttggtttgacggctgaaggtctggttcagggtggtgcagaaactgcacgtctgaacgccattgaaagtaactatgttggtaaagtctctgatctgagcgttccgcagctggtcttgtcctttatcccgaaaaacccgtttgccgatcttaccggagccaatccgacgagtattatcagcgtggtaatttttgccgcattcctcggcgtagctgcattgaaactgctgaaggatgatgcgccgaaaggtgaacgcgtcttagccgctatcgataccctacaaagctgggtgatgaaactggttcgcctggtcatgcagttgaccccttacggcgttctggctctaatgaccaaagtggttgcaggttctaacttgcaagacatcatcaaactgggaagtttcgttgtcgcgtcctacctcggtctgctgattatgtttgcagtgcatggcattctgctgggcattaatggcgtgagtccgctgaagtacttccgtaaggtatggcctgtgctgacgtttgcctttaccagccgttccagtgctgcgtctatcccactgaatgtggaagcacaaacgcgtcgtctgggcgttcctgaatccatcgccagtttcgccgcctctttcggtgcaaccattggtcagaacggctgcgccggtttgtatccggcaatgctggcggtgatggttgcgcctacggttggcattaacccgctggacccgatgtggattgcgacgctggtcggtattgttaccgttagttccgcaggcgttgccggtgtcggtggtggtgcaactttcgccgcactgattgtactgcctgcgatgggcctgccagtaaccctggtggcgctgttaatctccgttgaaccgcttatcgacatgggccgtacggcgttaaacgttagtggcagcatgacagctggcacgctgaccagccagtggctgaagcaaaccgataaagccattctggatagcgaagacgacgccgaactggcacaccattaattcttatgctggcaacggtccgttttgtataggggccgttgccttactttttaaatgttccatcgcggcgatgcatacactctcatatttaaacagatcgtcagcgaaaaaaatgtccaacttatcaatacattcctggctcaaactatgtgcctgtaggctgaagcttaaaacctcatacccgagacgttttctaagactactatctggaatactcataatatcttcaagcacaccacttcccattcccggaagatttagtggattaaaaagaagattgatattaagcatacttattatgctaggaaactttaggagactctcatttttttgaatcgcagcaaaaatgctcccgacaggatgtatataattttgttcatagtatatagtccttaaatagtgaataaccaacctgttttttatactgatcaaattggtcattttttctgggcgaaatacagaagtgacatccattccaataaaatctttatttatacctcttatccgaatttcactaccataaagattattaattattactctatatttaacattgtcctgcagatatgtatcaaaactaagtgctggcgctcctggcttactggcatcatagttaatgttagacatataggcaatcatataattaaagttactttctgctatttcatcgcagtcacattgacccgtacttataaagaaagtgagtgctgtcatagtagactgcagcctttctttaaaagagtcgaaagccaggcttttaatatttaaatcaccataattactctgtattaagtttgtagaaaacatctcccgcctcatattgttaacaaaattattatctcatttaaatctaagtcatttacaatataagtttaagagcgacgccacaggatgaactatcaaaaatagctcatcatgattagcaaaacttaaccattttaaaataaataaacaattaaagaaaaaagatcacttatttatagcaatagatcgtcaaaggcagctttttgttacaggtggtttgaatgaatgtagcaacgaaatacagaatttcaggtcatgtaactcccggcaaaaccgggaggtatgtaatccttactcagtcacttccccttcctggcggatctgatttgcccaacgttgggcagattcaggcacagtaaacgccggactgcgcagaaaactctctcccatcagtacaaacgcaacatatttgccacgcagcatccagacatcacgaaagctatccatctttatcgcatgttctggcggcgcgggttccgtgcgtgggacatagctaataatctggcggttttgctggcggagcggtttcttcattactggcttcactaaacgcatattaaaaatcagaaaaactgtagtttagccgatttagcccctgtacgtcccgctttgcgtgtatttcataacaccgtttccagaatagtctccgaagcgggatctggctggtggtctatagttagagagttttttgaccaaaacagcggccctttcagtaataaattaaggagacgagttcaatgagccaacataacgaaaagaacccacatcagcaccagagtccactacacgattccagcgaagcgaaaccggggatggacagtctggcacctgaggacggctctcatcgtccagcggctgaaccaacaccgccaggtgcacaacctaccgccccagggagcctgaaagcccctgatacgcgtaacgaaaaacttaattctctggaagacgtacgcaaaggcagtgaaaattatgcgctgaccactaatcagggcgtgcgcatcgccgacgatcaaaacagtctgcgtgccggtagccgtggtccaacgctgctggaagattttattctgcgcgagaaaatcacccactttgaccatgagcgcattccggaacgtattgttcatgcacgcggaagtgccgctcacggttatttccagccatataaaagcttaagcgatattaccaaagcggatttcctcagtgatccgaacaaaatcaccccagtatttgtacgtttctctaccgttcagggtggtgctggctctgctgataccgtgcgtgatatccgtggctttgccaccaagttctataccgaagagggtatttttgacctcgttggcaataacacgccaatcttctttatccaggatgcgcataaattccccgattttgttcatgcggtaaaaccagaaccgcactgggcaattccacaagggcaaagtgcccacgatactttctgggattatgtttctctgcaacctgaaactctgcacaacgtgatgtgggcgatgagcgatcgcggcatcccccgcagttaccgcaccatggaaggcttcggtattcacaccttccgcctgattaatgccgaagggaaggcaacgtttgtacgtttccactggaaaccactggcaggtaaagccagtctcgtttgggatgaagcacaaaaactcaccggacgtgacccggacttccaccgccgcgagttgtgggaagccattgaagcaggcgattttccggaatacgaactgggcttccagttgattcctgaagaagatgaattcaagttcgacttcgatcttctcgatccaaccaaacttatcccggaagaactggtgcccgttcagcgtgtcggcaaaatggtgctcaatcgcaacccggataacttctttgctgaaaacgaacaggcggctttccatcctgggcatatcgtgccgggactggacttcaccaacgatccgctgttgcagggacgtttgttctcctataccgatacacaaatcagtcgtcttggtgggccgaatttccatgagattccgattaaccgtccgacctgcccttaccataatttccagcgtgacggcatgcatcgcatggggatcgacactaacccggcgaattacgaaccgaacagcattaacgataactggccgcgcgaaacaccgccggggccgaaacgcggcggttttgaaagttaccaggagcgcgtggaaggcaataaagttcgcgagcgcagcccaagctttggcgaatattattcccatccgcgtctgttctggctaagtcagacgccatttgagcagcgccatattgtcgatggtttcagttttgagttaagcaaagtcgttcgtccgtatattcgtgagcgcgttgttgaccagctggcgcatattgatctcactctggcccaggcggtggcgaaaaatctcggtatcgaactgactgacgaccagctgaatatcaccccacctccggacgtcaacggtctgaaaaaggatccatccttaagtttgtacgccattcctgacggtgatgtgaaaggtcgcgtggtagcgattttacttaatgatgaagtgagaagcgcagaccttctggccattctcaaggcgctgaaggccaaaggcgttcatgccaaactgctctactcccgaatgggtgaagtgactgcggatgacggtacggtgttgcctatagccgctacctttgccggtgcacctagcctgacggtcgatgcggtcattgtcccttgcggcaatatcgcggatatcgctgacaacggcgatgccaactactacctgatggaagcctacaaacaccttaaaccgattgcgctggcgggtgacgcgcgcaagtttaaagcaacaatcaagatcgctgaccagggtgaagaagggattgtggaagctgacagcgctgacggtagttttatggatgaactgctaacgctgatggcagcacaccgcgtgtggagtcgcattcctaagattgacaaaattcctgcctgatgggaggcggcgcaattgcgccgcctcaaatgatttacatagtgcgctttgtttatgccggatgcggcgtgaacgccttatccggcctacaaaactgtgcaaattcaatatattgcaggaaacacgtaggcctgataagcgaagcgcatcaggcagttttgcgtttgtcagcagtctcaagcggcgcagttacgccgcctttgtaggaattaatcgccggatgcaaggttcacgccgcatctggcaaacatcctcacttacacatcccgataactccccaaccgataaccacgctgagcgatagcacctttcaagctcgcacttgtcaacacatccagctccgttaagcgtgggaaacagtaagcactctgacggatagtattatcgataaacgccggatgacacatcacctccaggctacgatcaccccgatggcctgcgtcatccagcacttgcaggaacaggctctcactgatctcttcaccgtagaatgcactgctgaatccctgggtagtgcgcaggttgaccggcaaatcaaacgccatctgacgatccgcccgcaacgcaatgccctgctctgccgcaaacctggcaacaatcgggaaaatctgcgggaacatatgcacatgatgatggctatcaagatgcgtaggtttgcgtccaaatagctcaatgaaacgcaaatactgactgacaagctcctgagtaatttcttccagcggtaaagcatcttcttctgccaactgccagatccattttcccagcacaccatcgcgggttaaccccggcatagctgtcagtggcttacccatagtaaggacaaagtgcatccctatggccagactcggttcatcacgactcaactgcaccgcatggtcaatagcctgcccattcaccagcgccgtcgtgctcgtgacaatcccattgcgacaggcctcgataatgccgtagttctgacctttgcttaagccaaaatcatcggcattaacaatcagtaagcgttccataatcagcctcggttaatgtgcttttttaagctctgcgatgcagtcggcaaagtttggcagccatttctcgtgcgccagaatcatctcgcgtgccagcagctcagcatcgcgatcggaatgcaccaacggactaaggtttagcgccagtaacacatcgttaaattctccgctaagtgcggcgttactggcagcaatctcgaagcctttaatggtgtgaatcagccccattactttatcatcgaaatgcgtaatgcgcggatgtggcgtcgcgccatcgcgccccagcttacaggtcatttctactgcccagtctgccggaatattatcaatctgcccatgatgcgggatattaacgtaatgttctgcttgcttgtcgttgtagatagcgttgatcacttcgcatgctgcatcagagtaataagccccaccgcgctgttccagttctttcggcttaactttcagctcaggatttttatacagctcaaaaagttgtttctcgactttctgtactacctgcgctcgtgcgccgcctttgtagtattcgcccatttcaatagccagcatctctttctgcttgaagtaatacagcagataagaacatggcagcagattcaagctacgaattaagccctcactaaatggcagatcgaaaatattttttacagaggacgcttttaactgcccactcgccacaccatcaagcaattcggcaaagcggctcttgccatttatcagcacatccttaatgaacaccatatggttgaggccgaacaaatcgatagataaatcatcgctgtctttcagcatcagaacatcgcgaataaacatcttcatgccgatcggaatattacacacgccgataaagcgtttaaatccggtatgacgataaacggcttcagtgaccattcccgccgggttagtgaagttaatcacccatgcattcggacaaagttcttcgacatcttttacgatgtcaaaaatcaccggaatggtacgcagacctttaaacaaaccgcccgcgccgttggtttcctgaccaagataaccatgacttaatggaatacgttcatccagttcacgcgccggtaattggccaacgcgcagttgggtagtaacgaaatcagcatctttcaatgcttcgcggcgatccagcgttttataaagcttcatcgggacgccagcgttatcaatcatccgttggcagagatcgaaaataatatccagtttcggtttaccaccttcgacatccaccagccataattcgctgaccggcaattcgtgataacgcttaataaatccttccagtaactccggggtatagctgctcccgccaccaatagtgacgacttttaatttctggctcataatttctcccttcagtacagaatactgatatctggcatatctgcccccccggacataaataatccagcaacaggacagatatgtgaattgtcaggtataacgacttactgattaaattcagtcaatttcttacgatagctcttaggcgtaaaggacgttaatttcttaaacgttttaataaacaaactcgggctactataaccggcctcaaacgcaatatccgtcacactatagttggtcatttccagttgttttttggcaaaattaatacggatttcattaataatctgcattggcgttttgccataatatcgttgagtcgctcgcgtcaaatattcctgacttttggcactcaacgccaccatattctccagcgcgctttcactaaactgctctttatcatgcatcttttctaccgtacttttcagccactgcggtacatcatcaatcacctgttcttcgcggtaatgacgtaaacggttaatgacataaaaagtaaccatctcaacaaactcttccagccctgtttcgcggaaattcaaactagaaatcactgtttccacataggtgagaaaagcgttattggtccggtatacctggctagcgacaaagcaataaggcaacaatggcaggtaatgctgctcaaaaaagcgtttactgatcccaacgttcaatatgcgcgtggcaccaaactcataaaaactttgatggtggctacctaacggaataaaaacaaaatcgccccgttccagtaacacgcgcttaccgttaatctcctggaaataacgcccggttaataccagagtaaattcataatagtcgtgctgatgcagtccgctgatactctcagttttgttatagataaacacatggaagtttttgccattaaacaactgctgttctcgggcagtggcaatttccggcgcgttaatcactggctgcatcatcgactccttatgccttcagtttttcatgaagctcaattaattcagtaatcagttcacgcgcaagcatggacgtcattaaatgatcctgagcgtggaccagcaccagactcactttcatcttaccttcgcccgcatcgccttcaatcagtttcgtctgtaccagatgcgcttcattcaatgccatccgactctgatccatcatggcttttgctgcggcaaaatcgccctgcttcgcctgtttcagtgccgcatacgccaggctgcgcgcttgtccggagttgatgatcagccccatcaccacttcttccagctcttcagcttccgtttgcgtatcgggaatgttatcgagatccatcatacatcgttcctctcttttcttaccggcacgattacccgtaccggcatcgattaaaatttcagggcgttagcgatatcttcttcgctctcttctttatcaatcgcattttgtgctttgttagccaccacaacaaagggcagataaattaacgttgcgatgccaaggttgaagagtgcgaccagcaatgcggcgacgctaccgttggtgttaaagaaggctcccagaccggttggcatggtccacggtgcaatattggtcaccggaggaataatgcccatgtagtacgctgcgagggtgattgccgccagaatcggttgtaccagtacaaacgggataaacatcaccgggttcatgataattggcagaccaaacagaatcggttcgttaatctggaagatgccggacggcagcgccagttttgccacctgacgataatcagcacggcgagaggcgataaagatagccaggatcaggcctaaagtcgcaccactgcccccaaggaaaataaaggagtccagcatcggcttggcccagatatggaaggtcttaccggctgccagcgccgcttcgacggaaccatattgctgataggtcgcgatattttccagtgcccacggcgtcataatgccgttgtccagtgcggtcagcgccagcgcgccatgaataccgaagaaccagagcagtggaacaaagatcacataggcccagcccaccacgctacccaagcttgccagtggggtactgatggtatccataatgatctgatggaagttggtgccccaggtattcaacgcccaggcaataatccccatcacggaaagaataataaagccgggaattaatgcgctgaaggaacggcttacactagcaggtacgctgtcgggcagtttaatgacccaattgcggcggacaataaaggtaaacatttctgccaccaccaggccaataataatcccggagatgatattcgccccacctaaccagtttgcaccaaccgcataggcctcaccgacactatatggggtgacggtcataaatgctgcaacggataacaacccagccgccagcgcatcgactttacgctcttctgccagcgccatgccaataaagaacggtgccattaaagacattattcctaatgttccgttatatacgttgccgccaatacctttcagaccattaagtgtttcaatggtactggcgtcgaggcgaatacctaaggaataaaaaaagctcccctccccaaagcttagaaaaacgttgttaattaatacaaacatggcccccgcaagggttaacggcattaagcgaataaagccatttttgattgcattaacgtgtggctgctttcctattttaactgcaaaagggaggagtaccttttcaaggcttgcaataacattactcatagaaaaatacccttaaaaaccgcaatttaaatattgcggtattgatttatgaaataactctttgacgggaaaatttaaaataaattaatttgctgcggcttttttaatcgctgcaaccgcagccttaagcacgcctaaaccatcgactttgccataaagcaggctgtcaattacttcaaccggtttgttgggtaacaaacgctggatttcgggcaacatataagcaatctgcggccctaataacacgacatcggcattctgacctttttcaccagccagtgtttccggaaatgcttcaataatgaccggaacttcatatttttctgcctgtgcgcgcattttacttaccagtaaagaggtagacatgcccgcagaacaaaacagataaatgtgtttcttttccataaaactgccctcatcgacgattatctgtcagccagacactccgcaagccttaacctgcttccatgctctgggtaacttgcgaaaccaacatgactttttttgtggctgaaaggagtatacggtatagacctgagcaatagtatttctttgaccttataaattgtttctccttgacctgtggttatgaccctcttcacatttcgggcaaataattcgcgaagataattaagaactcaggccaaaaaaaaccggcgcaatggccggtttccgttgttactcaagctttcagacgaattgattacttcgcagcctgtggatcagtgtcgtattcagcacaggtctgataaccggagttgatgacatatccggtatcatctaacgcgacaaagtaggtttctgctttaccatcacgttgacccaggatgtaggtctggcaagtaccgcgagcatggatcatgctcacttcagagctaggtttacccgcaatttgtgcaacctgcgcccggctcatgccttttttgacgtctttcaccacaggctgtacaaactggtctttggtacgatcataagccgtacaacccgccagcatggttaataccgccgctgcactcagaattcctgccatattcttgttcatattccgtcctcttgtttatcagcgtgttagataagcctggaatacattgggcgctttttcaagcccgtgaacgaaacggctccgctttcagaggattcctgtatgacgttttaaccaccattcagcccgctgtcgcttgtcgtttcagtagcaacgggttagctttaaggaagttttgtcttttctgtctggaggggttcaatgacattgcaacaacaaataataaaggcgctgggcgcaaaaccgcagattaatgctgaagaggaaattcgtcgtagtgtcgattttctgaaaagctacctgcaaacttatccgttcattaaaagtctggtgctcgggatcagcggcggtcaggactccacgcttgccggaaagctgtgccagatggcgattaatgagctgcgcctggaaaccggcaacgaaagtctgcaatttattgccgtacgcctgccctatggtgttcaggccgacgaacaagattgccaggatgccattgcctttattcaaccggatcgcgtattaaccgttaatatcaagggcgcggtattggccagcgaacaggcattgcgggaagcaggcattgaactgagcgattttgtccgtggcaatgaaaaagcgcgtgagcggatgaaagcacaatatagcattgcgggtatgaccagcggtgtcgtggtgggcaccgatcatgcagcagaagccattaccggattcttcactaaatatggtgacggcggtacggacattaatccgctgtatcgtctcaacaaacgtcagggtaaacagttactggcggcattagcttgcccggaacacctttataagaaagcgccaacggccgatctggaagatgatcgcccttctctgccagatgaagtggcactcggcgtgacctatgacaatatcgacgactatctggaagggaaaaacgtacctcaacaggtcgccagaacaatagagaactggtatctgaaaaccgaacataaacgccgtccgccaattaccgttttcgatgatttctggaaaaagtaataatttgcacatattggattgtgcgaaaaagagtaatttgttcacgccggatgcggcgtgaacgccttattcgacctataaaactatgcaaattcaatacattgcaggagtcgaataggcctgacaggcgtagcacgtcagacggtgtaacctttgtcatcgacccgcctcttttttaatcgcttcccgcctgttacactggatagataaccagcattcggagtcaacagtggtacggcgtttaacttctccgcggctcgaatttgaagctgcggcaatttatgaatatcccgaacatttacgtagtttccttaatgacttacccacccgaccaggggtgtatctgtttcatggtgaaagtgacaccatgccgctctatatcggcaaaagcgttaacatccgcagccgcgtcctttctcatttacgtaccccggatgaagccgccatgctacggcaatcccgacggatcagctggatatgtaccgccggtgaaatcggcgctctgctccttgaagcgcgattaatcaaagaacaacagccgctgtttaataaacggttgcgccgcaatcgccagctctgtgccctgcaattaaatgaaaagcgcgtcgatgtggtgtatgccaaagaggtggattttagtcgagcccccaacctgtttggcctgtttgccaataggcgcgcagctttgcaagcattgcagaccatcgctgatgaacaaaaactttgttatggcctgctgggactggaaccgttaagtcgcggtcgtgcatgttttcgtagtgcgctaaaacgttgcgccggagcatgctgcggtaaagagagccatgaggaacatgcgctacgcttgcgccagtctctggagcgtttgcgggtggtgtgttggccttggcaaggggcggtggcgctgaaagaacagcacccggaaatgactcaatatcatattattcaaaactggctgtggctgggggcggttaatagcctggaagaagcgacaacgttaattcggacacccgccgggtttgatcacgacggttataaaattctttgtaagccgctgctttccggtaactatgaaattactgaacttgatccggcgaatgaccagcgagccagttgattactgaacttgatccgggctatgaccagcgagccagttgatttcactgaacaacagtttaccttgcggttgtaaaagccgcagggtgtgcctgccatcgaaccagcacgcgccctggtcggtagtgagcaatttatcgcccagttgccacgccccgttaatcacaaacaccaccccgccgcgactgccaaaggtagtaaacgtacgttcggcaattctgactttcgccttacagacatccaggcgtgtcatgatgttgaaatccatgctcatctgccctgccgtcagtttcgcttttaccacctggtccgctgcaaaggcaaaaggctggaacggttttaaggtatggttaaagcggtctgcgctttcaaggagcatctcgccgccttccagcaacgtcactatcctttccatgccgggaaacaaagaaaactccccattcgccgcgatggatgcaatgctggcacgccagtaaaaatcacgttttgccggtgggaacgtgcaaatttcgcgcgtttcaccggcagcatttcgccacagattcacgctcattttacgcatatcaaagtattccatactcgctcccggcccgttcttttcattgttatcgttcaggtaaccgtggatggttatcggcaactcgggtgatttacgttagtggtgatcaggctttttttacaactgtttgagaagagaaaagaaaaccgccgatcctgtccaccgcattactgcaaggtagtggacaagaccggcggtcttaagttttttggctgaaagattattcagcagttgcaggcattttaccttttgccgctggacgttctgtcagacgcttctcaaaattagcattaaattgctttttctgttccggcgtcaggatgttgtaaattttgttctgggtttccatgtgcgccagcatgttagctttgcgctgttcttccatttttgcgatctgcgcttcagcttttactttatcgaaggtatcgctggcaatgatgtcatgcattgcgcggcgttcttccagcggcggacgtttcatctggtcacgctggcctttcatgatttcgcggatctgctgtttctgcgcgtcggtcaggttcaggtctttgaacatcatgtcctgatgcggaccgaacttgcctttgtggtgcatcatcggcttcgcgtcagccggtgctgcggtagtggtgtctgcggcatgggccaggttagccgcgccaagagccagggtagaggcaacaaacagtgcagttaatttacgcatattctatatccttcctttcagttatttattacggctttcttaagtagcgtgccgtgttgacgagattaactttactgactttagcgtcaattaatcagagcaacggtaaaacaatgaaagtgtaaaaaacacttttgcgccaattatggagaaaaaaagaaaatttgatggagagtgatgagagaatattacaacacgatgattttgcagagattatgaagaactataccggatgactggtgataaataaagcaaataaccaggattaatctgtattaatttataagaaagcaacttaatacccgcagaatgatttctgcgggtaagtattagcttattttttcgagcattaatcccgcgcgtaatcccaacgctaccaacggattagggaataacacatactctacatcatgggttacggtaaaacgttcctctccgtcctgcgccagcaatgttcctttctcaaacggcataaaattcagcgtgtcacttgccatatgcatttcgaaggacgggctgtggcgagtaatttggctaaccacccgataacggagcggcggtgttctcacgataccgacactctcaccagatagcagcgcagcaattgcgctggcagttactgcaaactggcgaagatcgttttgcccaaagggcaacgctttgccaagttccagcgtacaggccagcgcgccaaaatgtctggcgctgaaatgggtaaacgtaccaccaggttcctgatggaacaccagcgcctccagccccgccgcacccagccacgtcagaaatttctcgtcccagggaatgtcgcgttgcggtaatacaccgaactgcggatgcaaggagccacgaattgcggtatgtagatcaaggtgccagcgcacagattctttgccctggtcataaaaatcttccaggcactgttccagttcgcgcgcccgacaggtttctccgctttcagcaaatagctgccaacgaccgccaaacattcgattcatatcgctatggcaataacgtttcccttgcttcagcgcaggaggattcccgaggatcaccagcaaccgccaacgtaacgggatctcgccgtgagatatcgcgccaagcaacgcgtccagcatctccacaggtgccgtctcattaccgtgtattcccgcactaatcaccagtgcgccttgcggtggcgttaatggcgtcagttccagcacaccatcgcccagccagcgccagcgaacgccgttgatttctcgctcggtgataaccggttttttacccgttaaggtcagagcaagaaaattatccattgccccctccctcgcgctggaacggataaacgctaccgagattcagtaattggctcaatacatccagtgcttcccgcccttcgcgcagcaattgcgggtcggccagatcggcagcagtaaggcgatcgcggtagtaacgatccacccagtcattgagcgcattaaacagcgtatcgttcatcatcaccgccggattcaccgcccggcgttcttcttctgtcaataccacccgcaaccgcaggcacgccgggccgccgccattcgccatgctttcacgtaaatcaaagacttttagttcgctaatcgggttgtcagcggcaaggagttcattgagataaccccatactccggcgtgttcccgacactcctgaggcagcaccaacatcatggaaccatcatcgcggctcagcagttggctgttaaacagataggtagacaccgtatcagacacggaaacctgagttgccggaacttctatcgccataaaaccattgacccgcgcacgcaggtttgccagtaactgactctggcgagcgaacgcctgttggtggcaaaacagcacctggcggttactcacggcaatcacgtcattatgaaaaacgccctggtcgataacgtccgggttttgctgggcgaaaatcacctgttggggattcacctgattcagccttgccaccgcctcgctggcttcgcgagtctgtcgcgccggataacgggaaggccgggtatcattgccttcttctcgcccgtagacaaaaagttgcatacccggttcaccgtaatgaccgccgagacgattgtggtttgccgccccctcatcaccgagcaacgctacctgtggcaacgcgctatggacgctaaatttctcttcgtcgttaaaaatcgcttttaacaggctttcagtgacgggcgcttccaggctacggtgaaatttattgttcaggttggcaacggtgagatgcactttgccatccagcgtatcggcagatggcgcgatcgttgccgcattggctacccacattgggctagcggaactgacgctggaaagccagtgcggtgcctggcgtgcaactttttccagtacctgctcatcgctaccactgaatcccaactgacgcagcaccggaataaacggacgctcgtgcggcgggatcacggcctgggggaatcccgcatcggcaagggctttcattttcagtaagccctgcttcgccgccagtcgcgggttagacacctgaaaacggtgacgggtagaggcttcattaccaaagctcaggcccgcgtaatgatgcgtcagccctaccagcccgtcgaaattgacttcccaggcgttcatcgcaccacctcatcggaaaaatccagcccggggttaagcgtggcgggcaatgttaagctgtcgctctccaggctcgccatcggccatgcgcagtaatctgcggcataccaggcgctggggcgatggttaccggaagcaccaatgccgccgaatggcgcggtactggcagcaccggtaagcggtttgttccagttaacaatccccgcccgcgcctccagcaacagttgatcgaacttttcccgctcgggggaaaccagaccgcaagagagtccgaagcgagtgttattcgccattcgaatcgcttcatcgaaagtatcataacgccagacgcgcaataacggtccgaacacctcttcatctggtacgccagcaacgcctgtcatttcaatgatccccggcgtcagcaagcttgtccctgcttgtaataagcgcggcgcaagcaggggtcgtccgcccatcgcttccagttgctgccatgcagtaaccacctgctgtgcggcctgttcagaaatcagcccgccaataaacggctgcggttcgtcatcccagttgcccggcgttaatcgctggctgacggcaaccagacgagcaagaaacgcatcgccctgcgccccgcttttcagcaataaacggcgggcgcaggtgcagcgttgaccggctgtgacaaacgcgctctgaatggtcagatggacagccgcgtcgatatccgccacctcatcgataattagcggattattaccgcccatctcaagggcgagaattttctccggctgaccggagagctggcgatgcaactggtagcctgtattggcgctaccggtaaacagcaaaccgtcgagatcctccagcgcactcagcgcctgacccgtttcacgcccgccctgcaccaggttcagcacgcctggcggcaagccagcctgctgccataaacgcattaccgcttcgccactccacggtgtcagttcgctgggtttaaagataatggtgttacctgccagcaatgccggaacgatatgtccgttcggcaaatgaccagggaaattatacggcccaaacaccgccagcacgccgtgcgggcgatgtcgcaggctcgccgcgccgtccggcatttcactacgctgctcgccggtacgaacgtgatacgccttaatacttatcgcgattttattgatcatcgccgtcacttcggttgccgcttcccagcgcggcttacccgtttctctggcaataatcgcggttaattcggctttattgctttccagcagtgcggcaaagcgttcgacaacggcatgacgttcagcaaaactaagccgcgcccagcgcggaaacgccgcacgggctgcccgacaagcctgctcgacctgagcggcatcggcatcattgccttgccataacacctcgccgcttaccggattacgcttcacacggcttgcgccctggcccgttatccagtcaccgttaatccataaagtcatgctgttttctcctctgcgcacaggcgcaccagacgaacgcgatccccggcgtggcatttgagggcatccagttgtgcggcggttaaaatcaaacgctcggttgccggatcggtacgcaccagcaccacgcggaaatggtgataattttcattggcgaccaggcaggctgggaaatcgccctgcgcaggctgcccttctgccacttccaccagccgacttttacggatggcgcgcacgcggtcgatgtcacactcaagcgtcggcccaccgtcaaagatgtcgatatagttacggtagcgaaaaccttctttctccagcaccgcgcgggcaggcgcggtttgcggatgtacctgaccgatgacgtcctgggcttcctgggataaaaagtgggtatagatcggatgtttcggcatcagttctgcaataaatgccttttgcccggtgccgcagagaaaatcggcgcggctaaaatccatgctaaagaagcgtttaccgaggctttgccagaacggactatagccgtgttcgtcaatcaccccgcgcatttcagcaaccactttgtcattaaacttgtcgcgaaaagccgccataaacataaagcggcttttgctcagcaaatagccgttgccctctttgcgccagtccgggtcgagaaacagcgtgcacagctcgctgctgccggtgtgatcgttactgagaaacagcgtcggcaatgcgttatagacattcagctctttactggcgtgaaccaacgtgccgacgcgatagttgtaccagggatcgttcagcccaaccgccacctcaatggcacaaatccccgccacggtgcctgtctcgctatcttccagcacgaacacatagccctgctcacttttgggcagttcgccttgccaggttttgattgccctttcgatacgcgcgctaagcgtggcttcattggcgggaaggctcgtcaggccgccgcccgttttgctggcaagctgcatcagcgcgctgacatcacttcgctcaacgggacggatgaccatcatgatgaacctcggctaacaaattatttcaactactacctcggctaacaaagtgttcgcaagcagctgcaaagcgatccagtccggtcgtcacctcttcttcgctgacattgagcgcaggcgcaaaacgcaccacgttgccacccgcaatcagtaccatcacgcctgctttcgccgcttcctgagagatctgtttcgcttgcccggcgtaatcggcattcagtacacagccaatcagcaaacctaagccgcgaacttcactgaacaaaccatagcggtgattaatagtattaagacgctcaacaaaccagtcgtgacgctgtttaacgccattaagcatctctggtgtgttgatgagctccagcactttgcctgccaccgcgctggccagcggattaccgccataggtggtgccatgagtgccaacggtcatcacgcgggcgcactcttcggttgccaacaacgcaccgaccgggaaaccgccgcccagcgctttggcggtagttaacagatcaggcgtcacgccgtagtgcatataggcatacagttccccggtgcgcccgacgccggtttgtacttcatcaaaaatcaacagcgcattgtggcggttacacaattcacgcagaccttgtaaaaacgcgttgctggctggcaccacaccgccttccccctggatgggttcgacaatcaccgcacaggtagagtcgtcaatcagcgcgctggcagagttaatatcgttatatgcagcatgacgaatatccgccggcagtggcgcaaaatcctgactataggctggctgcccacccgcactgacagtaaacagcgtgcgaccatgaaacgcatttttgaacgccacgatgccgctcttatggctgccgtagcggtcgtgagcgaatttacgcgccagttttagcgccgcttcgttggcttccgcaccggagttacaaaagaagacgcgatcggcaaacgtggcgtcgatcaattttttcgccagtcgcagtaccggctcgttggtgtaaccgttgccggtatgccagaacttactcgcctgttcgttcagcgcttcacgcagttccggatgcgcatggcccagcgcgttcaccgcaatgccacccgcgaagtcgatatactctttcccctgctgatcccacaagcggctaccttcgccacgtaccggtataaagggtgccggagcgtaaacaggtatcatccattcatcaaagttttcacgcgtaattggctgagacatagcgacctctacagtaaataattcgttatttatatgttaataataagtaatgtttgcgctgtaaatgtagattgcagggttcgtgccagccagtgataaaagtgcataaacggcggaggctaactggaaatcaaggagttataaccaaaccatatgcatttaaagtgcatataaagtgaatacgtttgcgatgtgggtgaataaaaagaataaaaaacgcaatgttatgcagaagtaaaatataattctggaattgtgatcattgacgaaatttactggaaattactgcgccattctgacgcagcgcgcaccaaaagcgggcatttttttgcgccatcgttgacatcattaacaaccatcgatcaaatcacttaacaacaggcggtaagcaacgcgaaattctgctaccatccacgcactctttatctgaataaatggcagcgactatgaaatttgtctcttttaatatcaacggcctgcgcgccagacctcaccagcttgaagccatcgtcgaaaagcaccaaccggatgtgattggcctgcaggagacaaaagttcatgacgatatgtttccgctcgaagaggtggcgaagctcggctacaacgtgttttatcacgggcagaaaggccattatggcgtggcgctgctgaccaaagagacgccgattgccgtgcgtcgcggctttcccggtgacgacgaagaggcgcagcggcggattattatggcggaaatccccagtctgctgggtaatgtcaccgtgatcaacggttacttcccgcagggtgaaagccgcgaccatccgataaaattcccggcaaaagcgcagttttatcagaatctgcaaaactacctggaaaccgaactcaaacgtgataatccggtactgattatgggcgatatgaatatcagccctacagatctggatatcggcattggcgaagaaaaccgtaagcgctggctgcgtaccggtaaatgctctttcctgccggaagagcgcgaatggatggacaggctgatgagctgggggttggtcgataccttccgccatgcgaatccgcaaacagcagatcgtttcagttggtttgattaccgcagtaaaggttttgacgataaccgtggtctgcgcatcgacctgctgctcgccagccaaccgctggcagaatgttgcgtagaaaccggcatcgactatgaaatccgcagcatggaaaaaccgtccgatcacgcccccgtctgggcgaccttccgccgctaatttagcagctctcctggctcaaactgggtcaggagaattaaccttgagaaaaatcaacaaactgtcagtaatgatttgttgcctgccgtcctttgttataccgtctctgcgtttttagttgtctgaccacttctctattatcaagtttgatataggaaactccacgatgaacgctgagcgtaaatttctttttgcctgtcttatttttgcgctggtcatttacgctatccacgctttcggtttattcgatctgctcaccgatttaccccacttacagacactcatccgccagagcggatttttcggctatagcctctatattctgttattcatcattgccaccctcttgctgttaccaggaagcatactggtgatcgcgggaggaatagtttttggcccgctcttagggacactactcagtttaattgccgccacgctggcctccagctgcagtttcctgctggcgcgctggctgggacgtgatttactgctgaaatacgttggccatagcaataccttccaggccattgaaaaaggcattgcgcgtaacggtattgattttcttattctgacccgcttaatcccgttgtttccttacaatattcaaaattacgcttacggattaaccacaatcgccttctggccttatacccttattagcgcactcacgaccctacccggtattgttatttataccgtgatggcaagcgatctcgccaatgaaggcattacgctgcgctttattttacaactctgtctggcgggcctggcgctgtttattctcgtccagctcgcaaaactctacgcccgacacaaacatgtggatctgtctgctagccgccgcagcccacttactcacccaaaaaatgaaggataaaacgatgttgcaacattatagtgtgagttggaaaaaaggactggctgcactctgtttactggctgttgctgggcttagcggctgcgatcaacaagagaatgcggcggcaaaagtggaatacgacggacttagcaacagccaaccgctgcgtgtcgatgccaataaccatacggtaaccatgctggtgcaaattaatggtcgtttcctcaccgacgacactcgtcacggtattgtgtttaaagatggctccaacggacataaaagcctgtttatgggttatgcgaccccgaaagcattttatgaagccctgaaagaggcaggtggtacgccgggcgaaaacatgacgatggataataaagaaacgactcatgtcacaggcagcaaactggatattagcgtcaactggcaaggggcggcaaaagcgtattccttcgatgaagtgattgttgacagtaatggcaagaaactggacatgcgctttggcggtaatttaacggcagcagaagagaagaaaacgggttgcctggtgtgtctggatagctgcccggtcggcatcgtcagcaatgcaacatacacttatggtgcggttgaaaaacgtggtgaagttaaattcaaaggcaatgccagtgttctcccggcggataacacgctggcaacggttacctttaaaatcgccgaataaagccaggataaaggatgatgatgatgcaaagccgaaaaatctggtactaccgtataaccctcatcatcctgttgttcgctatgctgctggcatgggcgctgcttcccggcgtccatgagtttatcaatcgcagcgttgcggcgtttgccgccgtggaccaacagggtatagaacgctttattcagtcttacggcgcactggcggcagttgtcagcttcttgttgatgattttgcaggccattgctgcaccgctacctgcgtttttgatcacctttgccaatgcgagcctgtttggcgcgttctggggcggcttgctgagctggaccagtagcatggccggcgcggcgctgtgcttttttatcgccagagtgatgggccgcgaagtggtggaaaaattaaccggcaaaaccgtgcttgacagtatggacggctttttcactcgctacggcaaacacaccattctggtctgtcggttattgccttttgtccctttcgatccaatcagctatgctgccggtttgactagtatacgttttcgcagcttttttatcgccaccgggcttggtcagttaccggcaactattgtttattcctgggcgggcagcatgttaacaggcggtactttctggtttgtcaccggactgtttattctgtttgccctgaccgtggtgatttttatggcgaagaaaatatggcttgaacgccagaagaggaatgcctgatgggtttaccgccgcttagcaaaattcctttaattttacgtccacaggcgtggctgcatcgtcgccattacggcgaggtgctaagccccattcgctggtgggggcggatcccgtttatcttttatctggtgagcatgtttgttggctggctggagcgcaaacgcagtccgctcgatccggtagtacgaagccttgtcagcgcgcgcattgcgcaaatgtgcctgtgtgagttttgtgtggatatcaccagtatgaaagtcgccgagcgcaccggcagcagcgataaactgctggcagtggctgactggcggcaaagcccgctctttagcgatgaagaacggctggcgctggagtacgccgaagccgcaagcgtaacgccgccaacggtcgatgatgccctgcgtacccgactggctgcgcattttgacgctcaggcgctcaccgaactgacggcattgatcggcctgcaaaatctgagtgcccgttttaattctgccatggacattcccgctcaggggctgtgccgtattcctgaaaaacgttcttaaggagagatgatgcgccattgtgggtggttgctgggattgttaagcctgttttctctggcaacacatgccagtgactggcaagaaattaaaaatgaggccaaagggcaaaccgtctggtttaacgcctggggcggcgataccgcaattaaccgctatctcgactgggtgagcggcgagatgaaaacccattacgctataaacctgaagattgtccgtctggcggatgccgcagacgcggtgaagcgcattcagaccgaagccgcagccggacgtaaaacgggcggcagcgtggatctgctctgggtgaacggcgaaaacttccgcaccttaaaagaggccaatttattacaaacgggctgggcggagactctgcccaactggcgctatgtcgacacacagctgccggtgcgggaagatttttctgtgccgacacaaggtgcggaaagcccctggggcggcgcacaactgacgtttatcgcccgccgcgatgttacgccacagccaccacaaacgccgcaagccttactggagtttgctaaagccaatcccggcacggttacctatccgcgcccaccggactttaccggcacggcgtttcttgaacagttgctgattatgctgacgcccgatcccgccgcattaaaagaagcgccggacgatgcgactttcgcccgtgtcactgctcccttgtggcaatatcttgatgtgctgcatccgtatttgtggcgcgaaggaaaggatttcccgcctagtcccgcgcggatggatgctctgctgaaagccggcacattgcgcctgagcctgacctttaaccccgcgcatgcgcagcaaaaaatcgccagcggcgatttgcctgcaagcagttacagttttggctttcgcgaggggatgattggcaacgtgcatttcgtcaccattcctgccaacgcgaatgccagtgctgcggcgaaggtagttgccaatttcctgctcagtcccgatgcgcaactgcgtaaagcagatcccgctgtctggggcgatccttctgttctcgatccgcaaaaactgcctgacgggcagcgcgaaagtttgcaaagtagaatgccgcaggatctgccgccggtactggctgaaccgcacgcaggttgggtaaatgcgctggaacaagaatggctacaccgttacggtacgcattaatctttttgctgtgggcgatggtggcggtgatttatgcaccgctgatcccggcagctctcacgctgataagccctgctttgagcttgacacactggcaggcgttatttgccgatccacagttaccgcaggcattactggcaacgctggtgagcacaaccatcgcggcggtcggggcattgttgattgccctgctggtgattgtggcgctgtggcctgggccgaaatggcagcgtatgtgcgcccgtctgccgtggctgctcgccattccccatgtggcttttgccaccagcgcccttctgctctttgctgacggagggctgctttatgactatttcccgtatttcactccgccaatggaccgatttggcatcggtctgggcctcacccttgcagtgaaagaaagcgcatttctgctgtggatcttagcagcagtattgagcgaaaaatggctgttgcagcaggtcattgtgctggatagcctgggctacagccgctggcaatgcctgaactggctgctgttgccctccgtcgcgcctgcgctggcaatggcgatgctggcgattgttgcctggagcctgagcgtcgtggatgtggcaattattctcgggccaggtaatcccccgacgctggcggtaattagctggcagtggttaacccagggcgacattgaccaacaaacaaaaggcgcgcttgccagcctgctgttgatgctgttactcgccgcctacgttttgctgagctatctgctatggcgcagctggcggcgcactattccccgcgtagatggcgttcgcaagcctgccacgcctttattgccgggcaatacgctggcgatttttttacccttaaccggtgtgctgtgtgtggttctgctggcgatcctcgcggatcagagcacgatcaatagtgaagcgctcatcaacagcctgacaatggggctggtggcgacattcatcgctttgctcctgttactgctgtggctggaatgggggccacagcgtcgccagttgtggctatggttgcccattttattacctgctctgccactggtggcgggccagtacacgctggcgctatggctgaaactggatggaagctggacggcggtggtctgggggcatctgctgtgggtgatgccgtggatgctgtttatcctgcaacccgcctggcagcgcattgatagtcggttaattttgattgcgcaaacactgggctggagccgggccaaaatcttcttttacgtgaaatgcccactcatgttgcgccctgtgctgattgccttcgcggtgggatttgcagtcggtattgcgcagtatatgccaacgctgtggctgggcgcggggcgttttccgacgctcaccactgaggcggtggcattaagcagcggcggcagcaacggtattctcgccgcccaggctttatggcaactgctattaccgcttattatttttgccctgaccgcgttagtcgcaaaatgggtaggttatgtcagacaaggactccgctaatgctctgcgtgaaaaatgttagcctacgtttaccagaaagccgcttgctgacaaacgttaactttacggtggataaaggtgacattgtcacgttaatggggccgtctggctgtggaaaatccactctgtttagttggatgattggtgcactggccgaacagttttcttgtacaggtgagctatggctcaatgagcaacggattgacatcctacccaccgcacagcgtcagattggcattctttttcaggatgcactgttatttgaccagttcagtgtcgggcaaaatttactgctggcgctaccggcgacacttaaagggaatgcccgacgtaatgccgtgaatgatgcacttgagcgtagtggccttgagggagctttccatcaggatcctgccactttgtctggcggtcagcgagcgcgcgttgctctactacgcgcccttctcgcccaaccaaaagcgttactcctggatgagccattcagccgtcttgatgtggctctgcgcgataattttcgccagtgggtgttcagcgaagttcgcgccctggcgatccccgtcgttcaggtaacgcacgatctccaggatgttcctgctgatagttctgttctggatatggcgcagtggagtgaaaattacaacaaactgcgataacgcaaagtttttctcaatgcgtcagttcagaatggcgcactcaaaactacaatgtcgggattttcgatgaaacgtgtttctcaaatgaccgcgctggcaatggctttagggctggcttgcgcttctagctgggccgctgaactggcgaagcctcttacacttgaccagcttcaacaacaaaatggcaaagcgatagatactcgccccagcgcgttttataacggctggccacaaaccttaaatggcccttctggtcatgaacttgccgccttaaacctctctgccagctggcttgacaaaatgagcaccgaacagctcaacgcgtggatcaagcaacataacctgaaaaccgatgctccggtggcgctgtacggtaatgacaaagatgtcgacgccgtcaaaacgcgactgcaaaaagcaggtttaacgcatatctccatcctgagtgacgcgctaagcgaaccttcccgtctgcaaaaactgccgcattttgagcagctggtttatccgcaatggctgcacgacctgcaacaaggtaaagaggttacggcgaaacctgccggtgactggaaagtcattgaagcggcctggggcgctcctaagctttaccttatcagccatattcccggcgctgactacatcgataccaacgaagtggaaagtgaaccgctgtggaacaaagtttctgatgaacaactaaaagcgatgctggcaaaacacggcattcgccatgacaccacggtcattctgtatgggcgtgacgtatacgctgcagcgcgtgtggcgcagattatgctttatgctggtgtgaaagatgtgcgcctgctggatggcggctggcaaacctggtccgacgcgggactgcctgttgagcgcggaacgccaccgaaagtgaaagcggaaccggatttcggcgtgaagatcccggcacaaccgcagttgatgctcgatatggaacaggcccgtggactgctgcatcgccaggatgcaagcctggtgagcattcgtagctggccagaatttatcggtacgaccagcggttacagctatattaaaccaaaaggtgaaatagccggcgcacgttggggacacgctggtagcgacagcacgcatatggaagattttcataacccggatggcaccatgcgcagcgccgatgatattaccgctatgtggaaagcgtggaatatcaaaccagagcagcaagttagtttctactgcggcaccggctggcgcgcgtccgaaacctttatgtacgcacgcgccatgggttggaagaatgtttccgtgtatgacggcggctggtacgaatggagcagcgatccaaaaaatccggtagcaaccggtgaacgcggcccggacagtagcaaataacattgcaattactgacgctggaggctcttcagcgtcagatacccactccacacccgcgtaaaggtcgtcatccagcacaacgcaccgaagatccacgcaaaccacgcaaaccatgcagggaataaacatcccagcacaaacagtaagatcgtttctgtgccttcggttaatccccccagatagtaaaagctcttatgtgcataaccggggttatcaatctgatgttttgctgccagtgcagcaaaggcgagaaaactgctgcccgtgccgataaacgcaaacaacaaccagccgcctgccagcgcattttgctccggtgcagcaagaataaagccaaacggcaccagcgcgtaaaagagaaaatcgagagaaatatcaagaaagccgcccgcgtcggtaagctctctgcgccgcgccagcgcaccgtccagaccatcaagcagcctgttcaacaaaatgacgactagcgccgccagataccagcccagcgccagaaacggcagagccagcacgccgatggcaaatcccactaatgttaaaccatctggcgtaatgcccggtttatcaagaacccgcacgcactgatgcaacaacggtttaatccggggatgaagatggcggtctagcacaggcactccttaaatataaagcctttctgattgagcaacagtgcggatattatggcatttttcgcttatctgcccgtgtgtaatttatgaaaatgattgaagttgttgccgccatcattgaacgtgatggcaaaattttactcgcgcaacgccccgcccagagcgatcaggcgggattatgggagtttgccggtggtaaagtcgagccggatgaaagtcagcggcaggcgctggtgcgtgagttacgcgaagaactgggcatcgaagcaactgtgggtgaatatgttgccagccatcagcgagaagttagcgggcggattatccatcttcatgcctggcacgtacccgacttccacgggacgttacaggcacatgaacatcaggcgctggtctggtgcagtcctgaagaggcgctgcaatatccgctggcccctgctgacattccattattagaggcgtttatggctttacgcgccgccagaccagcggattaattatggctttacgcgccgccagaccagcggattagtgctaagggttttgtcatcacgctggcattgcagcagtattccttcggctttaattaccgccccttcagaataattttgatcctgataaacgcagcactgagtacagggctgcgcactctgcccgccactactgaacacttctggcggtacgtttacctccacgtccggacgataatgcgggttagccagtgcaattaatggaaatgctaatactacggcgaacaatgctcgactcacagggaactccttaacgttattgtctctgctactgataacggtagccgggtggcaaaactttagcgtctgagttatcgcatttggttatgagattactctcgttattaatttgctttcctgggtcatttttttcttgcttaccgtcacattcttgatggtatagtcgaaaactgcaaaagcacatgacataaacaacataagcacaatcgtattaatatataagggttttatatctatggatcagacatattctctggagagtttcctcaaccatgtccaaaagcgcgacccgaatcaaaccgagttcgcgcaagccgttcgtgaagtaatgaccacactctggccttttcttgaacaaaatccaaaatatcgccagatgagtttactggagcgtctggttgaaccggagcgcgtgatccagtttcgcgtggtatgggttgatgatcgcaaccagatacaggtcaaccgtgcatggcgtgtgcagttcagctctgccatcggcccgtacaaaggcggtatgcgcttccatccgagtgttaacctttccattctcaaattcctcggctttgaacaaaccttcaaaaatgccctgactactctgccgatgggcggtggtaaaggcggcagcgatttcgatccgaaaggaaaaagcgaaggtgaagtgatgcgtttttgccaggcgctgatgactgaactgtatcgccacctgggcgcggataccgacgttccggcaggtgatatcggggttggtggtcgtgaagtcggctttatggcggggatgatgaaaaagctctccaacaataccgcctgcgtcttcaccggtaagggccttagttttggcggcagtcttattcgcccggaagctaccggctacggtctggtttatttcacagaagcaatgctaaaacgccacggtatgggttttgaagggatgcgcgtttccgtttctggctccggcaacgtcgcccagtacgctatcgaaaaagcgatggaatttggtgctcgtgtgatcactgcgagtgactccagcggcactgtagttgatgaaagcggattcacgaaagagaaactggcacgtcttatcgaaatcaaagccagccgcgatggtcgagtggcagattacgccaaagaatttggtctggtctatctcgaaggccaacagccgtggtctctaccggttgatatcgccctgccttgcgccacccagaatgaactggatgttgacgccgcgcatcagcttatcgctaatggcgttaaagccgtcgccgaaggggcaaatatgccgaccaccatcgaagcgactgaactgttccagcaggcaggcgtactatttgcaccgggtaaagcggctaatgctggtggcgtcgctacaagcggcctggaaatggcacaaaacgctgcgcgcctgggctggaaagccgagaaagttgacgcacgtttgcatcacatcatgctggatatccaccatgcctgtgttgagcatggtggtgaaggtgagcaaaccaactacgtgcagggcgcgaacattgccggttttgtgaaggttgccgatgcgatgctggcgcagggtgtgatttaagttgtaaatgcctgatggcgctacgcttatcaggcctacaaatgggcacaattcattgcagttacgctctaatgtaggccgggcaagcgcagcgcccccggcaaaatttcaggcgtttaactgtatttaacggaacttgctccccacggaacatttcttatgggccaacggcatttcttactgtagtgctcccaaaactgcttgtcgtaacgataacacgcttcaagttcagcatccgttaactttctgcgatagcagcagatatgccagtaaagaaatcccatttgactatttttttgataatcttcttcgctttcgaacaactcgtgcgcctttcgagaagcaagcattatataatgccaggccagttcttcttcaattgtcccgttttgaaaagctgtgctacttatgctgatcatccaacttaattccgccgcccatattagcttcgcgctggatttaccggagctatgattagcgcaatcagagatatagtcactgggaaaaacagcaaatttattcaacaaggcgataacctgctctggggcttcctccatgtttgctttaaaggtattggctccatggtcgccagaaagaaaatgctccattaaggcacaataactttcgctatcttcgataccccattgatcctctaaagactcgcgtcttttacttatgatatcgatgctgtcaaaaggaagcacatgatattggaaggtatctttgccaggttcaggctttcgcggccagaactccagcgtttcagaccattgcttatgatagaatcgataaggtgcgatcaattgtagcgcctgtaacttctcgatactgagcggctcaatacctttagcctgataataatgcagttgttctttttttgctttaaaaccggcccgaacaataagccccatcataattaatagataaagaaaagagcatcccgcggtaatcaggcctctttcattcaaaccgttggatgttatcgctgcgaacacaaacattacagcgacaacacatgttaaataaaacccccacttacaaagcagcatggccttattttctttaatcatccgttcaaaattactattaaatatttcccagccattaaaagaatacttctcgctcccaggatggttttgtaataaaacttttttcatcacattccctgttattacatactttagaggcgataattttatccatgcaaaaaaaatatccaacgaattttcttgatccgctggatatttcagaatatgactcgaatagcacgaaagattcactcgcttacgctatcgccccgcttccgacttcatctgctggcggactttttttcgcactacgtttacgcggtgcagcctttttcttatcagcactgccaccactgcccggagccacaatgccgcgaaactgccgcaccggcgtacgtttggcttgatcaataagctgatatagcgtccccaccagcggctgcataaagtcctgatagcgacactgcttttcgctgatttgcgtcagcacgctttcccagtgcgcggtcatgtccggtcgcgtcgccatctccggcaggctatggaatagcgcttttccggcgtcggtggagtggatatagcgcccttttttggtcaggaaaccacgcttgaacaacagttcaataatcccggcacgcgttgcctctgtccccagaccatcggtcgcacggaggatctttttcagatctttatcctgcacaaagcgcgcgatcccggtcatcgcgctaagcagtgttgcatcggtaaaatggcgcggcggctgggtttgccgctctaccacttcacctttttcacacagcaactcatcgcctttcgccaccacaggcagtggcgtgccgtcgttttcttcatcgcgctctttgctgcctaacagcgtgcgccagcctgcttcagcaagaaaacgcgctttagcgacaaatttgcctttggcaatgtccagttcgataacacacttgcggaacaccgcatccgggcagaattgcatcagatactgacgggcaatcaggttatagaccttcgcttcgttctccgtcaggttgatcgcagaactccgtgcggtcggaatgatggcgtggtgcgcatcgacctttttgtcatcccaacagcggttgcgtatatctggatctaccactggctgcggcaacagatccggtgcatgaacactgatggcattcatcaccgcgtggcgtccggcaaaatgttcttctggcaaatagcgacaatcagaacgcggataagtgattagcttgtgcgtttcgtacagtttctggcagatatcaagcacgttctgcgcactcagaccaaaacgttttgccgcttcaatctgcaacgcactaaggctaaaaggcagcggcgcggattcactttcccgtttatcgttatagctggtgacaatagccggttgaccactaatgcggttaaccacatgctccgccagtggacgatgtaacaagcgcccttcttcatcctggtacggttcacacgcttcgctcggttgccagatagcggtaaaccgctcatcggcaggtgtcacgatatgtgctttgacttcaaagaagtctttcgccacgaagttttcaatctcttcatcgcggcgcaccaccagcccaagcacgggcgtctgcacgcgtcccacggaaagtacgccctgataaccggcattgcgaccgagaatggtatacgcacgggtcatattgatgccgtacagccagtcggcacgcgctcgcgccagcgcagaaacgcacagcggtacaaactcactgttggaacgaagacggtcgatcgcccgctcaaccgcctgcgggttcaggtcgtttatcaagcaacgctgtacctgctggcgcttttccggtgccagttgcagatagtccagcacttcatccaccagcaattgcccttcacgatccgggtccccggcgtgaacgatttcgctggcttcatgcaggaaccgtttgatgacgttaagttgtttggtcacggagggtcggggctgtaattgccacttttccgggacaatcggcaaatccgcaagattccagcgcgcatagcggctgtcgtaggcgtctggctgcgcctgctcaagcaggtgaccgatacaccaggtcaccacctgaccattaccgcactcgataaagccatcgcctttccggtgcggtttgggcaggacatcagcaatggcgcgcgccagactcggtttttcggcaataaacaaccgcattgaattaacgaatctcaaccatggcacgaccgccgcgcgctggcaccagttcgccaattgccgtcagttcaatgccaaactcggcggctgtagctttgacctcattttctgcttccggcatgaccgccagcagcaaaccgccagaagtttgcggatcacacagcagatcgcgcacttcacgcggcatttcacccatcagatgaccgtagctggcaaagttacgttcagtgccgccaggtactgcgcccaacttaatgtactcttcaacaccggggagtttcgggatcgcttcatagtcgacgcgtgcctgcacaccagccccctgacacatttcgctcaagtggcccagcagaccaaagcccgtaacgtcggtcatcgcttttacgccttcgatgttggcaaaggacgcgcctgcgatgttcatccggcacatcacttccgtcgccagtccctgatgttctggtttcaacagactttttttctcagccgtggtaagaacgccgatccccagcggtttcgtcaggaacagtttgcatccggcttgtgcggtactgtttttcttcacccgctcggtcggtacgatccccgttaccgccagaccaaaaatcggctccggcgcatcgatggagtgaccgccagccagcgcaatacccgcctgacgacatgcatagcgtccaccttcggtcacttcgcgggcaatttctggggaaagtttgttaatcggccagccgaggatcgcaatcgccataatcggtttgccccccatcgcgaagatatcgctgatggcgttagtcgccgcaatgcggccaaaatcgaaaggattatcaacgatcggcataaagaagtcggtggtactgataacgctggtgccattgcccagatcgtacaccgccgcatcgtcgcgggtttcattacccacaagcaaattcggatcaacaaacttcgcctgctcactatgcaggatggtttccaacacttttggggaaattttacagccgcaaccagctccgtggctgtattgggtcaaacgaatgctgttctcgctcatggacatctcctgtcaatgcaatccgggtatggtaaccctcattccgtgaagtgataagtgagagtgtctgaattcctgcgcctttgctcacaatccagacagtttcgcgacaattatcagaaataagttacaaacggcgtcgggtccgggacgttaatgctcgtagatgctttcagctgcggcgtaccgaggtagagaaaaccgacaattttatcctgctcacggcaaccgaatgcttcacgcactaccggactttcagttaatgcgccactgcgccagatgccgccaaacccctgggcaactgctgccatttgcatcgccatgaccgcgcatccggcagacatttcctgttcccagcgcgggactttatgattctcttcgcatttcgccaccaccgtgatgatgagcggtgcgcggaacggcgcattacgggctttgtcgatagctttgtcatcactaccggcagcaatcgccccctgttccagtacggcgctgaaacgctcgcgcccttccccttcaatcacaaaaaaatgccacggttgcatggacttatggtccggcgcacgcatacccgcacgcaggatgttttgcagttgttcacccgttggcgcgggttcagccaagcgggaggcgctacggcgattgatcaatagttcgagtgcatccatttgattaactcctgtcgtgatatttattcacaaaattaacacgagagtggattttgttacagcacagtccgcaattcctgctgacaagtaccggttgggtcattacgataaccacatctattgcgcctgtgacaggtgtgaccttaagttgggagaatacatgcgaaccctttggcgatttattgccggattttttaaatggacgtggcgtctgctgaatttcgtccgtgaaatggtacttaacctgttctttattttcctcgtactggttggtgtggggatttggatgcaggtcagtggtggtgatagcaaagaaacggccagtcgtggcgcactgctgctggacatttctggtgtgatcgtcgataaacccgacagttctcagcggtttagtaaattaagccgccagctgcttggtgccagttccgatcgtctgcaggaaaacagtctgtttgatatcgtcaacactattcgccaggcgaaggacgaccgcaatatcaccggtattgtgatggatctgaaaaacttcgcaggcggcgaccaaccgtctatgcagtacatcggcaaagctctgaaagagtttcgtgacagcgggaaaccggtttatgccgttggcgagaactacagccaggggcaatattatctcgccagtttcgccaataaaatttggctgtctccgcaaggcgtggttgatctgcacggctttgccaccaacggtctgtactacaaaagcttgctggataagctgaaagtttccacccatgtgttccgcgtgggtacgtataaatctgccgttgaaccgtttattcgtgatgatatgagtccggcagcccgcgaagctgacagccgctggattggtgagctgtggcaaaactatctgaatactgttgccgctaaccggcagatccctgctgagcaggtattccctggcgcgcaagggttgcttgagggtttaaccaaaaccggtggcgataccgcgaaatatgcactggaaaacaagctggtcgatgcactggcaagcagtgcggaaatcgaaaaagcactgaccaaagaattcggctggagtaagactgataaaaattatcgcgccatcagttattacgattacgcattgaaaacgccggcagataccggtgacagcatcggtgtcgtctttgctaatggcgcaattatggatggcgaggaaactcaggggaatgttggcggtgataccactgcggcacaaatccgcgacgctcgccttgacccgaaagtgaaagcgattgtcctgcgtgttaatagcccaggcggcagcgttaccgcgtctgaagtgattcgcgctgaactggcagcagcccgggcagcgggtaagcctgtggttgtaagcatgggcggcatggcggcatctggtggttactggatttccacgccagctaattacattgtggctaaccccagcaccctgaccggttctatcggtatcttcggcgtgatcaccaccgtagaaaatagtctggatagcattggtgttcatactgatggtgtcagtactagtccgctggcggatgtttctatcaccagggcactgccgccggaagcgcagctgatgatgcagttaagcattgagaatggctataaacgctttatcacgctggttgctgatgcgcgtcatagcacgccggagcagattgataaaattgcccagggccacgtctggaccggtcaggatgcaaaagctaacgggctggtcgatagtctcggggatttcgatgatgcggtcgccaaagcagcagagctggcaaaagtgaaacagtggcatctggaatattacgttgatgaaccgaccttcttcgacaaagtgatggacaacatgtctggttctgtccgggcaatgttgccagatgcgttccaggccatgttacctgcaccgctggccagcgtagcctctaccgttaaaagtgaaagtgacaagctggccgcgtttaatgacccacaaaaccgttatgcgttttgcctgacctgcgccaacatgcgttaagtcttgtactgagtggccgacagatcgtcggccacattattttttacgtcgacgaatcctcttcccgctgtttcgccccatatttccttatccgcatagtatcaggtgcgctccccctgcctcacgtatatacttttgctctttcgatatcattcatatcaatatcatgcaaaagaaaagtatttacgttgcctacacgggcgggaccatcgggatgcagcgttccgagcagggttatataccggtgagtggtcatctacaacgccaactggcgctgatgccggaattccatcgcccggagatgccagatttcaccattcatgaatatacgccgctgatggattctagtgatatgacgccggaagactggcagcatattgctgaagatattaaagcgcactatgacgactatgatggttttgtcattctgcacggcaccgacacgatggcgtataccgcctctgcgctgagcttcatgctcgagaatctcggtaaaccggtcattgtgacagggagtcaaatcccgctggctgagttacgctctgacggacaaattaatctgctgaatgcgttgtacgttgcggcgaattatccgatcaacgaagtaacgctctttttcaataaccgattgtatcgcggcaaccgcactaccaaagcccatgccgatggttttgatgcgtttgcctctccaaaccttcctccgttactggaagcaggtatccatattcgtcgtttgaatacgccacccgccccgcacggtgaaggggaattaatcgttcatccaatcaccccacaaccaattggcgtagtgacgatttatccagggatttctgctgacgtcgtgcgcaattttctgcgccaaccggtgaaagcattgattctgcgctcctatggcgtgggtaatgcgccacaaaacaaagccttcctgcaggaattacaagaagccagcgatcgcggtattgtggtggtcaacctgacacaatgtatgtccggtaaagtgaacatgggtggttatgccaccggtaacgccctcgcccatgccggcgtaattggcggtgcagatatgactgtagaagccacgctaaccaaactgcattacctgcttagccaggaactggatactgaaaccattcgcaaggccatgagccaaaacctgcgcggcgaactgacgccggatgattaaggagactgtaatgccccctcgcgccctgttactggtcgatttacaaaatgatttctgtgctggtggcgcgctcgccgtgccggaaggtgacagtacggtggatgtcgctaaccgcctgattgactggtgccagagccgcggtgaagcggttatcgccagtcaggactggcacccggcgaatcacggcagttttgccagtcagcacggtgtagagccttatacgccaggccaactcgacggtttgccacaaaccttctggccagatcactgtgtgcagaacagtgaaggcgcacaattacatccgttactgcaccaaaaagcgatcgcagcggtgttccataaaggcgaaaatcctttagttgacagttacagtgccttttttgataacggccgtcggcagaaaacctctctcgatgactggttacgcgatcatgaaatcgatgaattgatcgttatgggcctggctactgactattgcgtgaagtttaccgtgctggacgcgttacagttaggttataaggtaaacgtgattaccgatggttgtcgtggcgtgaatatccagccccaggacagtgcgcacgcgtttatggagatgagtgcagctggggcaacgctatatacgctggcagactgggaagagacacaggggtaattttacgctggcctacaattctgtactggcattgtaggccaaataaaacacgtcagtggcacatctggcaattgatgccatcaacgaaagatttaattcacctcagaaatctcttccaagctcaccttccgcgtttcgatgccaaaaatggagagaaccagcgcacagagcaataacataacaccaagtaccataaacaccgtgatgctcccataatgtgttaataatgccgcaacgccatagggcgtgaagactgcgacgatccgtccgacggcattaacgaaaccgctaccgcgcaggcgtaaatgcgttggccaaagctccgggatataaaccgcgctcgcgaagcaaacatacatgtataaaaagaagatcatcaccagtccatagattaaaatcgcccactctgtagtctgaatactatagatatagcctaacacggcaataataataagtaaggtggagccaaataaccgacgaggaaaatgatcaataattaatgccgcaataaatattcctaccggagcgccaatcataataacagcggtcattaatatacttttatcgacatcaatgccggagttaacaaatatggtcggtatccatacggtgatggtataaaggctaatgttcattgcaattaaaacagtaatcgcgactaatgtacgtcgtaacatttcacctttaaacaggagccagaaagtacccttgattactttaaccttgctgttgctctgatagctagtaagcgggggtaaacgaatactcttctctctttcaatttgctgctctacttcacgaagttggcattctgcacctgcgatttgccctttccctgccagccatcgtgggctctcgataaagtatttaccactgagaaaccaggctaacagtatgccaataccacccagcagaaacattattcgccaactaaaaaaagcgataaccaccacgcctatcgccgcagacagcatggggctccagttaccaacaaaactgagccgcgcggaccattttccacgcaccgtcgcggggataaactccgtaaaactggcatagccaaccataatcagcgcccccattcctgttcccatcaggaagcgaaagaagatgagccagtacatatcagggacaaaagcggcccctgttgcagcaataccgacgatgagaagatttatgcgaaacgccctgcgccgcccaaagtagtcaccaataaacccaccagtaagactgccgatgaaataaccaaacattaatgcgctggtaaaggcggcattgaggaaattattactccatccattgcttaccagctttgctaagacgacattaccggagtaactcaaaaaccctgttaataacagactaaagcttataataccaaatatacgataatgaaaccgggccaaaggcaagcggtccagtcttgcgccaatttgatcatattgttccattaggtgcctcggatttgctaaaaaggtagcaattgcggcaaattcacttgccgcatctttatcatcattttatttcaaggcgcaggaacaaataatattgacaacgtgtgcttaaattaccacaccagctggatattattgtctttgcaaaatgctatccactctgcacccggacttttatcagttattatgtaattaatatgactaaaatcagctaactggacaaaagctttgcgatcaaacttagagtgatcaaccaataacgcaacttctgtcgcctgacggatcattgtctttttgatttcagcttccgcttcattagagtccagcgcgccgctgttaatatcaagacctttacaactcattaccatgatatcgacatgatagcgcctgatgatctctttagtaattcttccttgcagactaagtgtatttttgtttagttccccacccgtactaacgactttaatttcactctgagccagaacatgaatcgcttccgcgctgttggttagcaacgtcaggccactacggtcctgtaacaatttgagcaattccattacggtactactggaatcggctgccatggtggttttattgtcgataaagggtagtgccttgcgtgcaataagctgcttctcttcataaaagctactagcgcgcttataaaaatggatattctccgtcaacatcgctgtatttaaaacagcaccaccataggttctggtcaaaaagccttcatcttccagcttctcaagatcgcggcgaatggtttcttcggttacctgaaaaatcccactcaaattactgactgtcacctttttatcgttggcaaccatttgcttaattgcctgaatcctgtcttttgccgccacgattacacccctgtatctttttacatcacattagcgcgattatcgcataaccgatgtttactttcaaaataacctgtttgaatcacagattttcatcacagttttcacagaaacagaggtgaatcgtgttgagtatttaacgctccagggcctctgccatttccctcatcaatgttgcgtctgcatcgcttaagttgatattcagtgccgcgacattttcgcgtacctgttccggtgcagtagccccactaagaatggagattaaatcactctgttttaatatccacgccagtgccagagtgggaattgtgcactgataacgagcacaaagtggctgccactgttcaagcatatcaatcactttcagcatgttttcacgctggaaccagactttatttgcccgagcgccgcccggaacgtaatcacgagtgatggtgccggtcaacaatccctgctctagcggggaataaacctgaaccacaatgccattatcacgacatagtggcagcagttcgttttccattgcccggtcgaggatactgtatttcgcctgaataatatccagttcaccatattgcagatactcgcggatatggtcagcatcgacgttagcagcgcctatagcgcgaattttcccttcagactttaactcattaagcactgcgacagtttcagcgatcggcgtaaaaaatggcggcacgctctgccagtgcgtcatgtagatatcgatgtaatcaatacccagacgttgcaagctcgctgctacctcttcgcggatagattccggggaaaggtttttatacaactgccgatcgccaactttgttgaataaacttccttttcgttcccagacaatgccgcatttggtttctactacaacctgttcacggggcagtttttttaacgcctgaccgacgataacttcactattgccaaagttatatcctggcgcagtatcaatcagattaatgccacaacgatgggcttcaagaatcgtatcaatacatatttgccgatcgagatcgccattccatgcaggaccgccgccaatggcccatgtccccaaccccattcggctaagcgtaatatccgttgtgcctaaaggtatctttttcatttgccttcattatccttcgtattcttccagcaattgttcgaccagctttctgttttttacgccggtggtggcaccgacgcttagaacgctgatagccgccgttgcattggcaaagcgtgcgcattcacgcagatttttgccttctaacagtgccgcaataaaaccactagcaaagttatcgcccgcgccaatggtgtcgatggcggttattcctgcgaccgccggcaccttcatcgtcatgtcaccacgcttgataaagcagccgtctttacccgttttaatcaccaccgtttttacgccgcacgcaagaaagcagtcagcaatttcatccagtgtctctttcccggtgagtaattttgcctcggcaaaattaggaaacagataatcgacataactcaatgcttcgcaaatatcatccagcgtttcattcaaccgcggtttgatcatatcggcacagataatcatctgccgggctttagcttgcgtaaaaatttctgttagcgctttaccatccaatagtggactgttgaaaatactggccagacttaataatttcgcctgagaaaaccgcgcaaaatcaacatcgtcaatattcaatttccacagactgccattacggtttgtgacaaacgtccgctcgccatcctccgtcaccagtccaacgttaatagaggtatctatgctgacgtcctgcttcaggctttgaatatcaatattctctttgcggcaatggtcgagaataaattgccctgcggcatctttaccaatacgactcattaatgctgtgcgatggcccagacgagaaataattgttgcttcatttattgcatcacccccggtggtcattgcgattctttcaagaggataagaatccacatcaaagatatttttactgaccggttgcaatggaatatcaacaatagcggcacctatacaaataacgtcgagattatccatatcattattccgctttgccatcagaaccgaacagtttaattttttccaatgcccgttcttttacagctttacgtacttcacgttctaaatgcaggaaaggctgatcctggttttctttcactgcaaccattgcggcctgacagagctccgtatgaatgttgattttcgcgatacccaagctaattgcagttttaatgtcggcatcactgatcccgcttgcaccgtgcaaaaccagcggaacagaaacggcatcgcgtacgcgtttgacgacctcaaagttcaattgtggctcactcgtataaaccccatgctggttgccgatggcgacagccaaactatcacagcccgtacgttcaacaaattcagccgcctggtcaggatcggtatagtgatagcccgccagcgcttcctcataaacggtttcattaccgacatgccctaattccgcctctaccggaatacccagcggatggaagaaatcgacagcctctttggttaaacgaatattttcttcgaaatcaaacgcggaagcatcacgcattaaactattcataccatgagtccaggcgttatgaataatctccatactccgaccatgatcccaatgagttattaccggcaccgttgctttttgtgccatacttaccatcatgtgagagaaatcttcaaaactggtgttaccgacaaaacctgtaccaaaagaaataataaccggggatttcgcttcttcggctgcgtcgataacgcccatcaacatttctgcattccatacgttaaaatgggcaattgcataatgtttatttgtggcatcgttttcccaatatctgatatctgcgagcatgttctgttctcccgtattaattaatcgctaattttaataacgcctttaataatgtcgcgtttgttgttaacactctcttcaaatgcctgttgtacatcccgataatcgtaaatatgcgtcaccatgcttttcacatcgaatcgcccactagaaatagcttcaatcgtgaccggataacgattggcatagcggaataccgtctggatagtgacttcgcgattgattttgaggaaattgattgcgctatcgccgggtacagtaccaacaatcataattttaccgccgcgcattaccagataaggtgcctgtttaacggtgaccgcagaacccgctgtttcgaaaacaatatctgcgcccatgtcttcggtaaattgctgacagcgtgcaatagtgtcttcttttgcgccgttaataaccactgtcgcaccaagctgttccgccattgccagacgtttttccagcacatcaacgacggcaatttccgttgctcccaggcatttgcacgcttgcaacgtcatcaaaccaatacaacctgctcccagaataattatcttcttacccggtttaacatctgccagcatcgcggcatgcatcccgactgcggcaggctccaccagcgccccttccatcgtgtccatattgtcgggcagtttgtaagtaaagctctccggatgacacagatagtgcgttaatgcgccgcggtagttgggttgtgtcgccataaaatcaacgtccgggcagatgttatatttgccttccagacagtaacgacagtgaccgcaaggaacgccaggttcgatatttacccgatcccccggtttaaatttgcgcacgcggcttcccacagccacaaccgtcccggcgcattcatgacccaggccaatttcttgatttgggtctttaggcggaataaacgggccactttcaaaaccatgtacatcactaccacaaataccgacatattctactttaatcaaaacttcatcttctttaggcactggtatttctgcactaataattttcattgtgcccggcacctgcaatattgctttactatttttcattttgaatccacccgtattatttattggctactgcatcaatacttaaactttcaacggagacacctttggtttcgattccaatggtggcgatagcaattgcgacaataatactaaccgcccccagaagaataaagactcccgtaacgccataactactgagcagcactgcaacggcataaggtgcggcaataccactgattcgccctaccgcattcgccagaccggagccacggagtttggcctctgtcggccagatttcagggacatacactgcgctggcatagcaagcgtacatatagacgaaagtaatcaggaagaaaccaatcaacgttatgagcaacatactggtttgcagactatagatatatccgagcaccgcaatcaggattaatagccccacacccattgttttacgcggaattttatccatcaccagcatggcaataaaaataccaaatggcgcgccaaacatactcatggtatttaaaacaatgctgtcttttaaattaatcccctgggtcatgaatattgttggcaaccagttaattagtgtgtactgcacaacgttcatggcaatcagcacacaagagcctaatatcacgcgtttcagtaatactcctgtcagtaaggcactatacggcaccgcttgtggcgctttaccgtcatcagcaataaccacaggcggcaaaggtttacccgtctggcgtatgacgccttcttctatactccgcatgactttctcggcttcctgataccgtccgcggctttccagccagcgcggggattcaggaaagtagcgccaggccagcgccgtagcgataaggctcaatattgcagggataagcagttgtacccgccagttccactctgcactaatcagcggcgtgagtcccatcgctatcaaactacagagcggataactccagttgccaataaaggaaacccgactactccacgttccacgatttctaccgggcatatattcggtgaaaccagcaaacagcgtaaccagtaaagctcccagcccaactcccatcacaaaacggcaggcaataaggaaatccatattcggactgaaagcaccgacaaccatgctggcaatatgaatggcctcatagaggatgaacgcatttctgcgaccggttttgtcgccaatgatgccgcccaccagcgcaccgagaaacattccggcggtcgtgattgcactgaatgtggctgtggtggaattatctgtccagcccaacgctttcagctgcgcgaggatcaagccaccaacggcattactccagcagacaagcaagccaaacgcgacgatggcaaacatactactatgccagcggcaatccggtaagcgatccagccgtgcaccacaatgcggttttgttatctgttccatgcgataacgttccttcaggagagtggttattcatcaaagtcgtaagtcatgatcactttgattgcggttttatcgaccatcgcatcaaacccttcgcgccattggctcaggccgatacgatgcgtgatcatcggtttgactttgatagcgccgctggctaatagcctgatagcgttacgccaactggtggagtcataggccatatgcccaatgatgcttttgttccaggcggtaatgtcattaatgctgaaatcaagaggtttgaagcccattccaacgcgtaccacttccccgttcgggcggagcatttcgatggcttgtttcagtgcgatattggcaccggagcattcaatcaccagtcccagattgtctttgccacaaatttgctggcagcgcgccaccacatcttcggtagaaccatttactactgccgtcgcacccagttcttttgcaaccgggaagcggaccgccacatcttcttgcagaccaacgacgacgatatttaccgcccccataattcgcgccatttgtacggagaacagcccgagtgggccagtgccgatgacgaccacatcctgaccaggaaggaatttgctttgctgcgcgatggatttgtaggcattacagatagggtcaagtacggctgcgtcctcataatcaacaccatcagggatttcccacaacgcatgacgatgaattttgagaatttcaccaggaaccagacaatatttggaaaaaccaccgccccaggtattattatccagaccaaggtttactttttctgtacaacacagaaaatcaccttgttcacaggccggacaaacaccgcaaacgtgaccgctgttatcgcttacgacgcgttgccccactttccagtctttgactttttcaccaacctgcgcaatacaacctgcgaactcatggccgcggatagagttaaactcatcagaaccgctatcgacattgtagtgcttcatgtctgcgccgcagattgccgcggctttaatttcaatcactacatcttccgggccacacatgggttgtgggacatcaatcatcttgtagccgccaaaggccttgccaaaccgagccagtgctttcattgcgtcatcctctgtgtttagttttgcttagatggccatcatacttacccacatgatttttgaggtcaacattaaatctgtaaaacacagataatgatctgcgttttacaactcagatcacaattacgcagaaaatggctgggtctgttacaggttgatggaaggcggggcgcaaaaagagcaaattcgagagggattaccggccaaataggtctgagacttaagttcaggagaagtcattcaggtgtgaacgggacggcaagagatcggactgggacttagccaggtcatggcgagataattgagatgagtcgtggggtcattgttggctatccccttcatagccgaggcaaaaaggggatgaaccacttacttaaacatggcaataggctttgcactgataccaaaatcttcttttaactgctgtttgctcttcatgaccatctgaccatttgtgtcaattgtcatatgctgtgcttcgatattatggcgggcttgccacagcatcaccagttgcaggcagttctctttttgttcctcggtcaacgcaacgccatcaggccatttccccagttcaacggcggtgctcaaacgctggtatacctcaggcatcatgctgttgataatgtcatcaagattcataatttttccgctcctgtggaataagttgctgaatcgttttttcaaccgttgatttcttcgccgttttcgccatcggtaaagcgtaaagaggcagagttaacacaataacgttcgcccgttggctgcggcccgtcggggaagacatgccccagatgggcatcacagttaccgcaacgaatttctatgcgctgcattccatgactcaagtctttgatataacgaatggattcttcacttaccggttcgtagaaactgggccagccacagccggaatcatacttggtttgggaatgaaacagcggggcatcgcagatcaaacagtgatatacgccgtcacgcttgttatgcagtaaacgacccgtaaatggcggctctgtcccatgattctgcgtcacgtaaaactgcatctcggacaaattttttttcagttcttctgcgctaggtttattagccatttgctcacatctcactttaatcgtgctcacattacgtgactgattctaacaaaacattaacaccaactggcaaaattttgtcctaaacttgatctcgacgaaatggctgcacctaaatcgtgatgaaaatcacatttttatcgtaattgccctttaaaattcggggcgccgaccccatgtggtctcaagcccaaaggaagagtgaggcgagtcagtcgcgtaatgcttaggcacaggattgatttgtcgcaatgattgacacgattccgcttgacgctgcgtaaggtttttgtaattttacaggcaaccttttattcactaacaaatagctggtggaatatatgactatcaaagtaggtatcaacggttttggccgtatcggtcgcattgttttccgtgctgctcagaaacgttctgacatcgagatcgttgcaatcaacgacctgttagacgctgattacatggcatacatgctgaaatatgactccactcacggccgtttcgacggtaccgttgaagtgaaagacggtcatctgatcgttaacggtaaaaaaatccgtgttaccgctgaacgtgatccggctaacctgaaatgggacgaagttggtgttgacgttgtcgctgaagcaactggtctgttcctgactgacgaaactgctcgtaaacacatcaccgctggtgcgaagaaagtggttatgactggtccgtctaaagacaacactccgatgttcgttaaaggcgctaacttcgacaaatatgctggccaggacatcgtttccaacgcttcctgcaccaccaactgcctggctccgctggctaaagttatcaacgataacttcggcatcatcgaaggtctgatgaccaccgttcacgctactaccgctactcagaaaaccgttgatggcccgtctcacaaagactggcgcggcggccgcggcgcttcccagaacatcatcccgtcctctaccggtgctgctaaagctgtaggtaaagtactgccagaactgaatggcaaactgactggtatggcgttccgcgttccgaccccgaacgtatctgtagttgacctgaccgttcgtctggaaaaagctgcaacttacgagcagatcaaagctgccgttaaagctgctgctgaaggcgaaatgaaaggcgttctgggctacaccgaagatgacgtagtatctaccgatttcaacggcgaagtttgcacttccgtgttcgatgctaaagctggtatcgctctgaacgacaacttcgtgaaactggtatcctggtacgacaacgaaaccggttactccaacaaagttctggacctgatcgctcacatctccaaataagttgagatgacactgtgatctaaaaagagcgacttcggtcgctcttttttttacctgataaaatgaagttaaaggactgcgtcatgattaagaaaatttttgcccttccggtcatcgaacaaatctcccctgtcctctcccgtcgtaaactggatgaactggacctcattgtggtcgatcatccccaggtaaaagcctcttttgcattacagggcgcacaccttctcagctggaaacctgcgggtgaagaagaagttctgtggttgagcaacaacacaccgttcaaaaatggcgtcgctattcgcggtggcgtaccggtttgctggccgtggtttggtccggcggcacaacaaggtctgcctgcgcacggttttgcccgcaacctgccgtggacgctgaaaagtcatcatgaagatgctgatggcgtagcgctgacttttgaattgacgcaaagcgaagagacgaaaaaattctggccgcacgactttacgctgttagcgcatttccgcgtgggtaaaacttgtgaaatcgatcttgaaagtcatggcgaatttgaaaccacctctgccctgcatacctactttaacgtgggtgatatcgctaaggtaagcgtcagtgggctgggcgatcgcttcattgataaagtgaatgacgcgaaagaaaatgtactgaccgatggtattcagaccttccctgaccgtaccgatcgcgtgtatctgaatccacaagattgcagcgtgattaatgatgaagcgctgaatcgtattatcgccgtaggccaccagcatcatctgaacgttgtcggctggaacccgggaccggcgcttagtattagcatgggcgatatgccggatgatggctacaaaacatttgtttgtgtagaaacggcttacgctagtgaaacgcaaaaagtgaccaaagagaaacctgcacatctggcgcaatccattcgcgttgcgaaacgttaatttacgttaatgttgtgtgccgggtgcaatgcatccggcacacaacatcacaccatatccagcgcagtttttccttttggtgccggatatgccttatccagcatagctaattccgcactagaaagttcgacctcaagcacagccgcattttgttggacatgggcaatcgtggccgcttttggaatcgccatcacaccctgatgactgatcacccacgccaacaatacttgtgccgcgctgatattgtgagcatgtgcaatttcgttgactaccgcgttttttaacagtccattgcgcaaccgcccggcctgggctaacggactgtaagccatcaccggcatctgctgttgctggcaccaggggagtagatcgtactcaattcctcgactaccgagatggtaaagcacctgattagtggcacactgatttccccccggcagctgccagagttcctgcatatcagcataatcaaggttagaaacgccccagcggcggatttttccctgggcgatcaatttttccatcgctgcgacagtctcttcaaaagcgaaactgccagaccagtgtaataagtaaagatcgagataatcagtattgagacggcgtaaactggcttcgcatgcatttatcgctttttgcccgccagcattccacggatagactttagagacgagaaagaccttctctcgcagaccggttaatgcttccccaaccaccttttcggcaccgccatcggcatacatttcggcggtatcaatgagggttaaaccgagttcaatgcccgcgcgtagtgcagcaacttctgttttgcgctgactggcatcttcgcccatataccatgttccctgccctacggctggcagactgacatcgccactaaattgaatcattttttgttgcattgtttcctcccaggtattgcaccaccgtaatgcaaaacagggcgtgacgccctgtttttatgcacaaaatgccctggaaagatgcattatcagaatttgtaggtgatcccggtagaaatcaggccagtccaggatttatccaccatcgggctgtcagtaacttcatcagacagacgggtgtagcgtgcggtaccgtaaacactccagtcgccgaggaagttgtagctggcgctcagctccaggtaagggctccagctgtcgttcgggttatagccacgcagaccgctgcgagcggactctttgcggcttacgccataatagtattcgttctggttttcgctgttccactgcacaccaatacccggagtcacggtcaggccaccgttggtgtaacgatacaaccaggccatatcccagacgatgccgttgctgttatccagggtatcgccagccagggtggtacgcaggtaaccgtactgggtaaagtgagcataagacagaccagccatcatggtgctcttacggtcatccaggtgacgcatttggtgatcgccactgtctttcgctttgaagtaaagcgggctccagtaagcggtaatactaagtttatccgttgcgtcattccacaggtagtaaccaccacctaagccacggaaccagaagttatcgccttcatagttgattaccggtactgggtaaacatcggtatcgtaatctttatatgggtgttcaacgacacctacgcctgcgcccagggaaaatttaccttcagcgtgcgctacgcctgcagacgttgcgataagcactccaagtgccagaagtttgagtttggtcacaattaatcattccttaaacaaatgtttagcgggcgacaaagtttacccgtcaatacatcgaaacccaacctttttacgttttcattttttaaagtaactgtttaattttcctgacgcggatgacaccgcgcttacagccaaatgaatttagcgttactggcgagcctggtctttacattaattatgcaaaatttatggatgagttgttgatatgccattgaaattaagaaagccgtgcaggcaagttttccatttgccatctacgcttaattttgaaggtgtatcaccgggcacgttgttctcatcgtcgataaaatggcatgagagttgctgtgttttagcaagagacgtcgttcagtttacctcttccgggagcctctactattcatatgaacggctcttaacctgtgctaaaaaacgaaaggacggcataccatgaatatattcgatcactatcgccagcgatatgaagctgccaaggacgaagagttcacactgcaggagtttcttaccacttgtcggcaagatcgcagtgcttatgccaacgcggctgagcggctattgatggctatcggtgagcctgtcatggtcgatacagcccaggaacccagactttctcgactcttttctaaccgggtcattgcacgttatccggcgtttgaagagttttacggcatggaagacgcgattgaacagattgtctcttatctgaaacacgcggctcaggggctggaagagaagaaacaaatcctgtatctgctggggcctgtgggtgggggtaaaagtagccttgctgagcgactgaaaagtttaatgcagctcgtaccgatttatgtattgagcgcgaacggtgagcgtagcccggtcaacgatcatccgttctgtcttttcaatccgcaggaagatgcgcagattctggaaaaagagtatggcattcctcgccgttatctcggcaccatcatgagcccgtgggcggcaaaacgcctgcatgaatttggtggcgatatcactaagttccgggtagtgaaggtctggccgagtattctgcaacaaattgctatcgccaaaacggaacccggcgatgagaacaaccaggacatctccgcgctggttgggaaagtcgatattcgtaaactcgaacactacgcgcagaatgacccggacgcctacggctattccggtgcgctgtgccgcgccaatcaggggatcatggaattcgttgagatgtttaaagcaccgattaaagtgctgcatcccttgttaaccgccactcaggaaggtaactacaacgggacggaaggtatctccgccctgccgttcaacgggattattctcgcacacagcaacgagtccgaatgggtcactttccgtaataacaaaaacaacgaagccttcctcgatcgtgtttacatcgtgaaggtgccgtattgcttgcgcatttccgaagagatcaaaatctacgagaaattgcttaatcacagtgaattgactcacgccccatgcgcccctggcacgctcgaaacactgagtcgtttttccattcttagccgcctgaaagagccagaaaactccagcatttatagtaagatgcgggtttatgatggcgaaagtctgaaagacaccgatcccaaagccaagagctatcaggaatatcgtgactacgccggtgtcgatgaagggatgaacggtctgagcacgcgttttgcgtttaagatcctctcccgcgtgttcaacttcgatcatgtagaagtggcagcaaacccggtccatctgttctacgtcctggaacagcagattgagcgcgagcagttcccacaagagcaggcagaacgctatctggagttcctgaaaggttatctgatcccgaaatatgccgagtttatcggcaaagagatccagacggcctaccttgaatcctattccgaatatgggcaaaacattttcgaccgttatgttacctacgcggatttctggattcaggatcaggagtatcgcgatccggataccgggcagctgtttgaccgcgagtctcttaacgccgagctggagaaaatcgagaaaccggcggggatcagtaatccaaaagatttccgcaacgagattgttaacttcgtactgcgcgccagagcgaataacagcggacgcaatccgaactggaccagctatgaaaaactgcgcacggtcatcgagaagaaaatgttctccaataccgaggagctgttgccggttatcagctttaacgccaaaacgagtaccgacgagcagaagaaacacgacgactttgtcgaccgtatgatggaaaaaggctacacccgtaaacaggtgcgtttactgtgcgaatggtatttgcgcgtacgtaaaagctcttaacaaccctggcccggtacacatgttaccgggcctacaacgacagcgaaccgtgggcctgagaagcggcaacacaggcgtagcatacagttggcaaatgtagtacggggggcatatgacctggtttattgaccggcgtctgaacggcaaaaacaaaagcatggtgaatcgccagcgttttttacgccgttataaagcgcaaattaaacagagcatctccgaggccattaataagcgtagcgtgactgacgtcgacagcggcgaatccgtatccattcccacggaagatattagcgaaccgatgtttcatcaggggcgtggcggtctgcgccaccgcgtgcatccgggcaatgaccatttcgtccagaacgaccgaattgaacgtccccagggtggcggcggaggttccggcagtggtcagggccaggccagccaggatggtgaaggtcaggatgaatttgtctttcagattagcaaagatgagtatcttgatctgctctttgaagatttggccttaccgaatctgaaacaaaaccaacaacgccagctgaccgaatataaaacgcatcgggcgggttataccgctaacggcgttccggccaatatcagcgttgtgcgtagtttgcagaacagtctggcgcgacgcacagccatgacggcaggcaagcggcgggaacttcatgcactggaagagaatttggccatcatcagcaacagtgaacctgcgcaactgctggaagaggaacgtctgcgcaaagaaattgcagaattacgtgccaaaattgaacgcgtcccttttattgacaccttcgatttacgttacaagaactacgagaagcggcccgatccctccagccaggcagtgatgttttgcctgatggacgtttccggtagtatggatcaatccactaaagatatggctaagcgtttttatattctgctgtatctgttcctcagcagaacgtataagaacgtggaagtcgtatacatccgccatcatacccaggcgaaagaagtcgatgaacatgagtttttctacagccaggaaacaggcggcaccattgtttccagcgccctgaaactgatggatgaggtagtgaaagagcgttataacccggcacagtggaatatttacgctgcacaagcaagcgacggcgataactgggccgatgactctccgctttgccatgaaatcctggcgaaaaaattattacctgttgttcgttattacagctatatcgaaattacccgtcgtgcacatcagacattgtggcgagaatatgagcatctgcaatctactttcgacaactttgcgatgcagcacatccgcgaccaggatgatatttatccggtgttccgtgaactgtttcataaacaaaatgcaacagctaaaggctaaaactatcagccaggtcattatcgcctggctgatttttagcttactgtaaattatctcatttattacatacattagcttacaatcgctttaaatatgacagcataacctttacataatttagttccagaaaacaatcattcggaaaaatgattcagagtacacgtatttccatggggttattctttaaatattttttaagcttaacgaaaattgatcctggtcaaaactatatatctctgccaagtataaaatccagcactcacattgctctcctttttatggtttctatgggtacacaaaaattaaaagctcaaagcttttttattttcagtttattgctgacgttaattttattttgcattactaccttatataacgaaaacacaaatgtaaaactcatcccacagatgaattacctgatggttgttgtggctttgtttttccttaacgccgtcatttttcttttcatgttaatgaaatatttcactaacaaacaaattttaccaacactcattttaagccttgcatttttaagtggccttatctatttagttgaaaccattgtaattatccataaaccaattaacggcagtacactgatccagacaaagagcaatgatgtttctattttctatattttccgccaactcagttttatttgtttaaccagcctggcgctcttttgttatggaaaagacaacatccttgacaacaataagaaaaaaacgggaatcctgttgctggcgctgatcccttttttagtttttccccttctggcacacaatctgagcagttataacgctgactattctttgtatgtcgtcgattactgtccggacaaccatactgcgacctggggaatcaactatacaaaaatattggtttgtctgtgggcatttttactgttctttattatcatgcgcacacgattagccagcgaactatggccgttaatagcattattatgtctggcaagcctatgctgcaacttacttctactgactctggatgagtataattatactatctggtatatcagtcgcgggattgaagtttccagtaaactgtttgttgtgtcttttctgatttataacattttcaggagctgcaactctccagcaaactggcagttcatgatgtgctgaccaatatttataatcggcgctactttttcaacagcgtagagagtttattgagccgacctgttgttaaggacttctgtgtcatgctggttgatattaatcagttcaaacgcatcaatgcccaatggggacatcgtgtgggtgataaagtgctggttagtattgtcgatattatccagcaaagcatccgccccgatgatattttagcgcgactggagggtgaggtgtttggcttgctatttaccgaactcaatagtgcccaggcaaaaatcattgcggaacgtatgcgtaaaaatgtcgaactcctgaccggctttagtaacagatatgatgttcctgaacaaatgaccatcagtattggcacggtttttagtacgggtgacacgcgtaatatcagccttgtcatgacggaagcagataaagccttacgcgaagcgaaaagcgaggggggcaacaaagtgattattcatcatatttaagtgcaaaaatattcagagccatgctttttgcgtggcttttgcatacaatttattactattacccctaaatttcccctccccagcggcgcagagatgagtataattagcgcccctgtgccaggccgcaatcgaactttatctggttttctcgtttcactaaccgaaggagatgcgtataaagcttccgatgagcgtttatatgtcaataagcagaacaaaaacagccgttcatgataaccttctgtggttgtttgcttgtaatctcaggagcgtgaaatgactgaaatggctaaaggaagcgtgacgcatcagcggttaatcgctttattaagtcaagaaggtgctgacttccgcgtcgttacccatgaagcggtaggtaaatgtgaagcggtgagtgaaattcgtggcaccgctctaggccagggtgctaaggcactggtatgtaaagtcaaaggcaatggcgtaaatcaacatgttctggcgatcctcgcagccgatcaacaggccgatctgagccaactcgccagccatataggcggattacgcgctagcttggccagcccggcggaagtcgatgaactcacaggctgtgtcttcggcgcgatcccccctttcagcttccatccaaaactcaaactggttgccgaccctctactcttcgaacgatttgatgaaatcgccttcaatgcaggcatgctggataaatccgttattttgaaaaccgcggattatttgcgcattgcgcaaccagaactggtcaatttccgccgcactgcgtaattagccggtccgttcgataagaagaacggacaaaaccagtacaacagcaatggcaaaaaagctactcgtgataatcagtgtctcgacaaacatttgatcgttcatagcatgcccccgggagatagctgttttcacgttattgttagcgtgcacaaatggcagtttgatgacagttcgcctgattttttatgcaaaaaacgtaaagattttctacttccttcctgcagcaagcgtaaagtaagcaggcttattattttttggcaaggaaaccacgatgtttgatgtcactttgctgatcctgctcgggttagctgcgctgggctttatcagtcataacaccactgtcgccgttagtattctggtgttaatcattgtccgcgtcacaccgttaagcaccttttttccgtggattgaaaaacaggggctaagtatcgggataatcattctgacgattggcgttatggcccccatcgccagcgggacgctaccgcccagtaccttgattcacagctttctgaactggaaaagtctggtggcgattgcagtaggcgtgattgtctcctggctgggtgggcgcggcgtgacgttaatgggcagccagccgcaactggtcgccgggctgctggtaggcactgttttaggcgtagcgctgtttcgcggcgtaccggttgggccgcttattgccgcgggtctggttagcctgattgtggggaaacagtaattattgccgcgggtctggtttcgcactttgtggggaaacagtagttaatctcgcaatatatcggcctggcgtttgccccaggcctttcttaaacatagtaataaaggccgttgtactatcataccccagcgtatgagcaactttctgtacagtatcgcctttcactaatccctgaagcgccataatcagctgtaactgctgacgccactggcgaaaactcaaccccgtctcttttactatcagtcgggcaagattgcgttcactcatcgcaaaaaagccagcccattgccccaatgccccccactcgacaggccctttcgccatcatctccaccatcgtgcggattttaggatgagaagaaacgggcaggtgcagctgttgttgtggctgctgagggagttcatcaaacaggacctgaattaatctgcgggtcattggctcagcacgctgagtcgtcgtcctgtttgccagggttaaaattaattcccggcataaggggcttattttcaatgtgcaacatgttgtcggcattgtcactgcgctgggttcgataaacagaaaacagagttcagcattagctgttacttgattgctatgttccaccccgcccggtatccaaaccgcatattgtggcggcaccatccacaaagcattttccaccgtacaggtaattgcaccatgtagcgccagtatcagctgtcctttgcggtgctgatgtacaggactggttaactcatccgttccggcgtgaatacaaaatgcgaccgcggcttcatggtgtcggtcgggttcatagccattgagattcaacctgtgcatcattttgtccgaacttagcgataatttgtcattttagcttgattcaacataacaataaaaacggtaaggtacagcctcgtttgtaacaatgagaagcatatgacctgtagtactagtttaagcggcaaaaacaggattgtccttatcgctggcattctgatgattgccacaacattacgcgtcacctttaccggcgcagcaccgttactggatacgattcgttccgcttacagcctgacgacagcgcaaaccggcttattgaccaccctgccattattggcctttgcgctaatcagtcctttggctgccccggtagcgcgacgttttggtatggaacgtagcctgtttgccgcgttacttttgatctgtgctggtatcgcaattcgctctctccctagcccttacttattatttggcggtacagcggtcattggcggtgggattgcattaggcaatgtcttactgccaggattaattaaacgcgatttccctcattccgtcgccagacttaccggcgcatattccctgacaatgggagctgcagcggcactgggaagcgctatggtcgtgccgctggctttgaacggttttggctggcaaggcgcgttgctcatgctgatgtgttttcctctgctggctctttttttatggctgccacagtggcgaagtcaacaacatgcaaatttgagtaccagccgcgccttacatactcggggtatctggcgtagtccgcttgcctggcaggtcacattgtttcttgggatcaacagtctggtctattacgtgattattggctggcttccggcgatcctcatcagtcacggctatagcgaagcacaggcgggtagtctgcatggtttgctgcaactagccacagcagcacccggtttgctgatcccacttttcttacatcatgtgaaagatcagcgtggtattgcagcgttcgttgccttgatgtgcgcagtgggcgcggttgggctctgctttatgccagcgcacgcgatcacctggactctgcttttcggttttggttccggcgcaacaatgatactggggttgacgttcattggtctgcgggctagttctgcgcatcaggcggcggcactcagcgggatggcacaatccgtcgggtatttgttggcagcctgtgggccgccgctgatgggtaaaatacacgatgctaacggtaactggtctgtaccacttatgggtgttgccatacttagtctactgatggcgattttcggactttgcgccgggagagacaaagaaattcgctaatatccggtgctatagtgacgtaacaaatcatgcgtgaaagggagaacaaacacgatgaatattcagtgcaaacgcgtttatgatccggctgaacagagcgatggttatcgcatactggtcgaccgcctctggccgcgcggtatcaaaaaaaccgatttagcccttgatgagtgggataaagaaatcacgccgagtacggaactgcgcaaagcctttcacggcgaagtcgtcgattatgcaacctttcgcgagcaatatcttgcagaactggcgcaacacgagcaagaaggaaagcggctggcggacatcgccaaaaaacagccgctgaccctgctctacagtgcaaaaaacaccacgcagaaccatgcgctggtgctggccgactggctacgtagcttgtgattttagtacagcatccggcggttatttttcaccagccggatggtcacgccgccacaatgcccattcatcaatcgtttcaccgcccggtaatttgcaattgttgctgaccccttgcgctgtctgcactggaatgagcgtcccgcccttctgctggcaatagacgctcgccggatttgccataccaatctgcggcggtttaggtgcttctggctgagaaggggtactacaaccagccaggaccagcaagcaaggcagaacaaaactgataattttcatttattgatctcacatatttatccaagattagagtatcgcggtatcgttttgttttgcagcactatttttattacattcactcaaaacatattacgtcttgtttcatctttgttgatgatgttttatcatgcctgcaaagattaaataatcagcatttacccgccgtatcctggagttgttccgtgagtgatcagattatcgcccgcgtcagccaatcccttgccaaagaacagagtctggaaagtctggtccgacagcttctggagatgctggaaatggtcactgatatggaaagtacctacctgaccaaagtggatgtcgaagcgcgcctgcagcatattatgtttgcccgtaacagccagaaaatgtacatcccggagaattttaccgtcagctgggattacagcttatgcaaacgcgccattgatgaaaactgctttttcagcgatgaagtccccgaccgttggggtgactgtattgcggcacgcaatcttggcatcaccacatttctgagcacgccaattcacttaccggatggaagtttctatggcacgctttgcgccgccagcagtgagaagcgccagtggagtgaacgcgcggaacaggttttacagttattcgccggactgattgcacaatatattcaaaaagaggcactggttgaacagctgcgcgaagccaatgctgcgctgattgcgcaaagctataccgacagcttaaccgggctaccgaatcggcgggcgatttttgaaaatctgacgacactgttttccctcgcccggcatcttaaccataagataatgatcgcgtttatcgatctggataacttcaaattaatcaatgatcgttttggtcataatagtggcgatctgtttctcattcaggttggcgagcgccttaatacgctccagcaaaatggcgaagttattggtcgtctcggcggtgatgagtttttagttgttagtctaaacaacgagaatgcggatattagcagcctgcgagaacgcattcagcagcaaatacgtggagaatatcacttaggtgatgttgatttgtattatcccggtgccagtcttggcatagtagaagtcgatcctgaaacaaccgatgcagacagtgccctgcatgctgccgatattgcgatgtatcaggagaaaaaacacaaacagaaaacaccttttgtcgcgcatccagcgctacattcctgaggcgtattcacatccttttgattggtgataacatgcgaatcggtattatttttccggttgtaatcttcattacagcggtcgtatttttagcatggttttttattggcggctatgctgccccgggagcataaagatgaaaaaaacaacgattattatgatgggtgtggcgattattgtcgtactcggcactgagctgggatggtggtaacgtcacctctaaaaaatagcaaaggctgcctgtgtgcagcctttgtgcaatttaagcgttaacttttaatcttcctgtagataaatagcacgacaatcgcaccaataacggcaaccacgaagctgccaaaattgaagccatcgactttaccaaagccaaacagcgtgctgatccatccgccgactacggcaccgactatccccagcaggatagtcataaagaatccacctccatctttacctggcatgatccacttcgccagaataccggcaataagcccaaaaataatccaactcagaatgcccattgtttcctcacttatctgttttgcattagcgggttagtcgctgataaaaagcatagcacaacatcgggagggcaagatttgtgacgagcatcacggaggttttttttgcgatggcgcagaaattgcgccatcaacgatcagtgataattaccaaccacaaacatcatgttcgttttccgtgtcataagaacgtacggtattcaccagatcttttatcacttcagccgccacttctggcaccagcaaagtcatcggcgtctctgtttcataatcgacagaaacgccattgctgttattggtgacggtcacggtatacgttgctttgcccatgattcatttcccgttatgaatgactttccgttgttgcgcaccttccatcaggacttcaggagccacgaagaagtcaatgttgaaataagtatcgtcagtcatggcttcaatgttgtgccacttttctggagggaacaccgcaaactgccccgcttcgataaggatcacctgatcaggctctgcactgtgttcatcagcgtagccgagatatttgaccgccccatgcataacggaaaggcgtgggtaaacccccgggcgcgttcctttatcaagatgacgttcgaatattccggcaggtgcagtttgtttattccagaaaggcgtactgcgcgtatgaatataattctgtgggatttgaagcatccttttccctccttcggtgaatgcgctgaaaacggtttattccagccgtttcagggtacgcctgataatttgcattttaaataccatttattggttactttttagcaccatatcagcgaagaatcagggaggattatagatgggaagcccgcgacaacgcgggctgaaagcatcaggattgcagcgtcgccagtcgggcagcgaaacccacgaacatcaaaccaatcagactgttgccaactttagccagtttctttttggtacgtatgtactgcgtgacaaaagcaccagatataatcaggaagctcaaatagcagaaactcaccagttccagcgtcgccgccagaataaagaaactaattcccgtatgtggggcattaacatcgataaactgtacgaaaaagctcacatagaacaaaatggctttcggattagtcaggctcaaaattaacgcgcgtttaaaaatagcaccgtattggggctcatcggatttggcctcgctatttttacccttcagggtcgcgtaaagaattttactccccagatagagcaaataaaacgcaccaagataacgtacaatgttgaataatatcggggtggtcttaattaatgtcgccactccagcccatgccagaaacatcaataccgcatcgccaataaatacaccgcaggccgcaagataaccgcctttcataccgctactgacgctatttttgagtacaaacagggtatttggccctggcaccaacacaataaaaatggccccaaccagataggtccagtaattcagaaccccgtattcagcgaacacattaacctctttaattatctttcgatcatgcgcgattaaaggtgaatatgctaaccaatctgtagcggcttagaaaggagaaaatcaggttttaacctgatatcaacccgataattgaatcattaatcaggcatgctccagactaaaattcgggtagtgctcggcaaaatactggcgtaaaaattctaccgttatccgcactttcgcactcgtcgccagcctactaacataaacggcccagacgttcgctggctggtaatattccggtagcacttgcactaaatgaccactggcaatgttttcgctaacatcccaccaggaacgcagagcaatcccctgcccatcgagacaccactgatggacaatttctccatgattagagctcagtgggccggtgactttaatcgcatgggggccttctttattgcgtaattgccagacaccaaaaggatgatcgcgctctttaatgaccaggcacggcaatgcagaaagatcggttaaatgtttcggcgcgccatgttgcgcaataaattccgggctcgcgcagagaatacggtaattggtcgccagtttgcgggcgattaaattaggggcgatgtcatcgccaatgcgaatatcgagatcgacaccttcattgaccaaatcgaccagtcggtcttccacatcaaaacgtaattccagttgcggatacgccttcgccagcgctaataacgccggagccaccacctgtcgtccaaaaccaaagctgctgataatacgcagcatcccctgcggcacctgacgcacgtcagaaagttcgtccatcatctgaccgacatcctgcaaaatccgctgcgcccattcataaatccgctctccttcttcggtaatggtgacgcggcgggtggtgcggtgtaacaacaccacgtttagcgtttgctccagcaaggcgatgcgcttgctgacgaacgccggactaacgcccagttcttccgccacggcggcaaaaccagcccggcgagccaccagcataaagacgcgcaaatcattcagcagcggtaaattattcatgattcgtgttttatgtttcaccagttacggggattaattccttttcagtcaattataggatggtgatgttgtcaattttgatggtcaggaagtgagaacccaatgatgaaaacgatgcgtattgctgcgatcccgggagacgggattggcaaagaagtccttcctgaagggattcgcgtgttacaggctgccgctgagcgctggggcttcgccttgagttttgagcaaatggagtgggcgagctgcgagtattacagccatcacggtaaaatgatgccggacgactggcatgagcaacttagccgtttcgacgccatctattttggtgccgtcggctggccggataccgttccggaccatattagcttgtggggtagcctgctgaaatttcgtcgtgaattcgaccagtacgtcaacctgcgcccggttcgtctctttcctggcgttccctgcccgctggcgggaaaacagcctggcgacatcgatttttacgtggtcagggaaaacaccgaaggcgaatattccagcctcggcggtagagtgaatgaaggtacagagcatgaagtcgtcattcaggaaagcgtatttacccgccgtggtgtcgatcgcattttgcgttatgccttcgaacttgcgcaaagccgtccacgtaagacactaacttctgccactaaaagcaacggtttagccatcagcatgccgtactgggatgagcgagtggaagcaatggccgagaattacccggagatccgctgggacaagcagcatattgatattctctgcgcgcgttttgtgatgcagccggaacgattcgatgtggtggtggcgtccaatttgtttggcgatatcctttccgatcttggcccggcctgcaccggcaccattggcattgccccatccgccaacctgaatccggaacgcactttcccgagcctcttcgagcctgtccacggttccgcgccggatatctacgggaaaaatattgctaaccctatcgccacgatttgggccggggcaatgatgctcgattttctcggcaatggcgatgagcgtttccagcaagcgcataacggtattctggcagcaattgaagaagtgattgctcacgggccgaaaacacctgatatgaaaggcaatgccaccacgccacaggttgccgacgcgatttgcaaaattattttgcgttaaggtcaaaccagtttatttgaaccgcgtcactgacgcggtttttttattcgttctttgcagtaaataacctgcgtcatttcaccttttattgtttccgtttcgtgttttatggctttccgtattcttaattgtttaatttatgtaacatgcaaattttgttacgcgtacgttaggttccgccgtacaggtattggttttgctggcaatgggactggtgatttatttagccaccagtaaatacggcaatattcgtcttggcgaaggaaaaccggaatacagcacgctctcctggctgtttatgtttatttgtgccggtttaggttcttctacgctttattggggggttgctgaatgggcctattattatcaaacacctggattaaatatcgcaccgcgtagtcaacaggcactcgaatttagcgttccctactctttcttccactggggcatcagcgcctgggcaacttatacgctggccagtttaatcatggcttatcactttcatgtgcggaaaaacaaaggtctgagcctttccggcattattgctgctattaccggcgttcgcccgcaaggcccatggggaaaactggtcgatttgatgttcctgatcgccactgtcggcgcactgaccatttcccttgttgttaccgcagcaacctttacccgtgggctttccgcgctgaccggtttacccgataacttcaccgtgcaggcatttgtgatcctgctttccggcggcattttttgcctaagcagctggattggtatcaacaacggtttgcaacgtctgagcaaaatggttggctggggcgcgttcctgctgccattactggtgctgattgtcggcccaaccgaatttattaccaacagcatcatcaatgccatcggcctgaccacgcaaaacttcctgcaaatgagcttattcaccgatccgcttggcgatggtagttttacccgcaactggaccgttttctactggctgtggtggatcagttacacccctggcgtagcaatgtttgtcacccgcgtttcccgcggtcgtaagattaaagaagttatctggggactgatcctcggcagcaccgtcggttgctggttcttctttggcgtaatggaaagctatgccattcatcagtttatcaatggcgtaatcaacgtcccacaggtgctggaaacactgggcggcgaaacagctgtacagcaagttctgatgagcttgccagccggtaaattgttcctcgccgcatacctgggcgtgatgattattttccttgccagccatatggatgcagtggcctacaccatggcggcgaccagtacgcgtaatctccaggaaggtgacgatcctgaccgtgggctgcgtcttttctggtgcgtggtgatcactctgatcccgctttccatcttgtttaccggtgctagcctggaaacgatgaaaaccaccgtcgtgctcacagcccttcccttcctcgtcattttactggtgaaagtcggcgggtttattcgctggctgaaacaggattacgccgacattccggctcatcaagttgaacattatctcccgcagacaccggttgaagccctggaaaaaacgccagtgctccctgcgggaaccgtattcaaaggcgacaactgagcgccatcatcctaacgataaaggtatccctatgagcaatctgagccctgactttgtactacccgaaaatttttgcgctaacccgcaagaggcgtggaccattcctgcccgtttttataccgatcagaacgcgtttgaacacgaaaaagagaacgtcttcgccaaaagctggatttgcgtcgctcacagcagcgaactggcgaatgccaatgattatgtgacgcgtgagatcattggcgaaagcatcgtgctggtacgcggtcgtgataaggttttgcgcgcgttctataacgtgtgtccgcaccgtggtcatcagttgttgagcggtgaaggaaaagcaaaaaatgtgattacctgcccgtatcacgcatgggcattcaaactcgatggcaacctggcccatgcacgtaactgcgaaaacgtcgccaatttcgatagcgacaaagcgcaactggttccggtgcgtctggaagaatatgccggattcgtcttcatcaacatggaccccaacgccaccagcgtagaagatcaattacccggcctgggcgcgaaagtgctggaagcctgcccggaagtccacgatctgaaactggcggcccgctttaccacccgcacgcctgccaactggaagaacattgtcgataactatctcgagtgctatcactgtggtccggcgcatccaggtttctccgactccgtacaggttgatcgttactggcacaccatgcacggtaactggacgctgcaatacggtttcgccaaaccgtccgaacagagctttaaatttgaagagggtacggatgcggcattccacggtttctggctgtggccgtgcacgatgctgaacgtcaccccgatcaaagggatgatgacggtcatttatgaattcccggtggattctgaaactaccctgcaaaactacgatatttacttcaccaatgaagagttaaccgacgagcaaaaaagcctgattgagtggtatcgcgatgtgttccgtccggaagatttacgtctggttgaaagcgtacagaaagggctgaaaagccgtggctatcgtggtcaggggcgcatcatggccgacagtagcggtagtggcatttccgaacatggtatcgcccatttccataatctgctggcgcaggtgtttaaggactaatgacatcggcggcggtattttccgccgctgggctgatttttgatggagtacagcaatgagtgactatcaaatgtttgaagtacaggtgagccaggttgaaccccttaccgaacaggtgaaacgcttcacgctggtggcaaccgatggcaaaccattacctgcgtttaccggaggaagtcacgtcattgtgcagatgagcgatggtgataaccagtacagcaatgcgtatagtctactgagtagcccgcatgacacctcttgttatcagattgccgttcggctggaggaaaacagccgcggcggttcccgctttttgcatcagcaggtaaaagtgggcgatcggttaacgattagtacgcctaataacctgtttgcgctaattcccagtgccagaaagcatctgtttatcgcgggcggtattggtatcacccctttcctgagccacatggcagagctgcaacacagcgacgtcgactggcagctacattactgcagccgaaatccagaaagttgcgcatttcgtgatgagctagtccagcatccgcaggctgagaaagtccatttgcatcatagtagtaccggaacacgactggaattagcgcgattattggcggatatcgaacctggcacacacgtttatacctgtggccccgaggcgctaattgaagcggtaagaagtgaagctgcgcgtctggacatcgccgccgatacgctgcactttgagcaatttgctatcgaagacaaaaccggcgatgcatttaccctggtgcttgcccgttccggaaaagagtttgtggtgccggaagagatgactattttgcaggttattgaaaataataaagccgcgaaagtggaatgtttatgtcgtgaaggggtatgcggaacctgcgaaacagcaatactggaaggtgaagctgaccatcgggatcaatattttagcgatgaagagcgtgccagccagcaaagtatgttgatctgttgtagccgtgcgaagggtaaacgcctggtgttggatttgtaatttgccgaagccggatgtggcgctgagcgcgcccagtccggcttcggaagattttactgcggatattcctgcaataaattgtgtaatgcttccgccatcagctcaccacgccagccggaaatcagctccggcaaattgttctgcggtttcagtttccagtgccagttcagcagttggttgatttgccgacggcttgccagcaattcggcgctgatcttatgcgtttcgctcacgtcagtaatcaggctcttaatcgctttaaacgctttacgataacccggcatgtccatcaggttaagcatcggctgcggtaaggcatcttccggcaatgtctgcgctttttccaccagcgctagcagcgttttaccgtgaaagcggatttcgctaccggataaacccaggctgtccagttcgcctaaacttcccggcatataacgcgctacgctccacaaatgctcttcacgcacgacaaagttcaccgccagatcgcgctctcgcgccttgcgcagtcgccagtcggctaacagttgcagacaggccagttggcgtgtgcgtaattgccaggcattggtgatatcacgccaggcatcttccggcgcaacgacttcctgacgacgcatttgcatcaggcggcattcatccagcgccgcaggtagccagccggaggcctccgtttctaccataagcttggcggtgatcggtaacagataccagacatccgccgctgcgtattcacactgacgttcggtcagcggtctggccagccagtcggtgcggctttcactcttgtccagcgtaacgccggaatactcttccaccatggaagcgaaaccccaactcatcgggcgtccgcagaaggcagcaaggatttgcgtgtcaatcaagggttgtggtaattcgccaaagacattgaggaacacttccagatcttcactgcctgcatggagaaattttgtgatggacggatcgcgcaggatcgctttcagcggactccagtcggtgatcccgagtggatcgattagcgccagatgctcgccatcgaaaagttgaatcaaccccagctgcgggtaataagtgcgcgtacgaacaaattcagtatccagggctatcgccggaaaggcacggacggcttcacacaaagaagccagcgcatcgtccgtggtaatcatttggtaattcaaattgttttctctttagtgggcgtcaaaaaaaacgccggattaaccggcgtctgacgactgacttaacgctcaggctttattgtccactttgccgcgcgcttcgtcacgtaattctcgtcgcaaaatttttccgacgttagatttcggtaactcatcacgaaactccaccagcttcggtactttgtatcccgtgagctgacggcggcaaaaagtcaccagactctcttcggtaaggcttggatcttttttcactacgaagattttcaccgcttcaccactggagccggaaggtacgccaacagccgcgacttcctgtacgccaggatgctgcatgacgacatcttcaatctcgttgggatagacgttaaaaccggaaaccagaatcatgtcttttttacgatcgacaatgcgcaggaatccttcttcatccattaccgcgatgtcgccggtgtgtaaccagccatttttgatgatttcatcggtagcatcgggacgctgccagtaacccagcatcacctgcggtcctttgacacaaagctcacccggttgacctggtggtacttcattatcatcatcatccaccagtttggcttccgtgctcggcaccggcaaaccgatgctaccactatgataatcaatatcatatgggttaacgctgaccagcggcgcacactcggtaaggccatagccttccagcagatactgtccggtcagtttcacccaacgctctgccaccacttgctgcactggcatcccaccgcctgcggaaagatgcagactggagaaatccagctgctggaactctttattgttcagcaacgcattgaacaaggtgttaacgcccgtgatagcggtaaacggatatttcgctaactcttttaccaaccctggaatatcgcgcgggttagtgataagcaggttctgcccacccagttcgataaacagcaggcagttaatggtcagggcaaaaatgtgatacagcggcagcgccgtcaccaccagctctttgcccggatgcaacagcggaccataggtcgcgttaacctgttccaggttcgccagcatattgcggtgagtcagcatcgcgcctttcgccacaccagtggtgccgccggtgtattgcagaaaagctaaatcttccggcaccagttcgggtttgacgtactgcatccggtagccgttatgcagtgcgctacgaaaactaatggcatctggcagatggtatttcggcaccaaacgcttgatgtatttaacaacgaaattgactaccgtgccttttgccgtagatagctgatcgcccatacgggtcagaattacgtgctgaacggcggttttatcaaccactttttccagtgtgtgagcaaagttagacacgataacaatcgcgcttgcgccgctatcgttaagctgatgctcaagctcacgcggggtatacaacgggttaacgtttacgacgatcatcccggcacgcaaaatgccaaacagcgccaccggatattgcaataaattaggcatcatcaacgcaacgcgatcgcctttcttcagccccaacccttgttgcaaataagcggcaaacgcgcgactgcgttcttccagcttgcggaaggtcattacctcccccatattcacaaacgcaggttgatcggcgtagcgcgcgacgctctgctcaaacatatctaccagagattgataacggtcagggttgatctccgtcggaacgtccgcgggataacggttaagccaaaccttcttcaattcttcacctctaaaatgcgtgttcgtcgtcatcgcaaccccaaatgatatacatgccgttaacataatattaactcatcataccagcttgataattacccaacgaaaaggttgcgaagcgcgtcactatttatttttatctttaccgtaagaatgcagaaacagcggaccagccgctgtttctttttctttaaaaacaagcaattattcagttacaactgtttgtactctcgcggggccgggattataccagccccatccgccgtagccatagggccagccacgaccgccataaaaccatggatcaatcggctgaggcggcataatcacctgctgggttaaatgccaacgtttgtaacccgttacttgcatcaccataaatttatagggcgtattgccgattttgccgtcaaccgcaccagtgattggcccgactaccgtaaccagttgtccacggaaatccaccgggtccagaaaaccgttcacatcggcataaatgcgaccgcgagaaggttctcccagcgtcggtctggctccgctgtccagcggtacggtagcaatttccaggcgagttttcccttgctggttttgtaccgcaaccactttgccaccaaagcgtgcctcctgaccaacgtacagctgcggcgcactcatcacccgaactaaatcttgttgcggcgtgggactgctgcctttaatggcgtccggcacagtgacacaaccgctcagcattagcgcaaacgtacctgccagtatgcctttgataacattcttttgaaccgccatggtgcgactcctttttttctcagggcatactcttaagattcattctttgcccggaagtttcttccatgcgacgttgttacgtaaataaaccggttcggcatgttccaccgccaccgttttaccctcagcaaacatctgacacgcaatcggcagcatatcttcagcagcaggcagtaacacttcgccatcgcgcaaaaccagcccgctctctttaccgagatccggccaagcttgccagcccgtccctaccgtcacccattcgccggaaagctgttgcattcgttcatggacgatttcgggtttgagtacggcttcggtttcttcaccgtgccagataccgttttcatcacgctgatattcggcccagtaaacttcgcccattcgcgcgtcaatggctgccagcacgcgggttgcgccgtttttgcgccacgccccttgcgccatcgtcattagcgtggagacgccaatcatcggtaattccgcgccaagcgccagcccttgcgcgatgccaataccaatgcgcacgccagtaaagctaccggggccgcgcccgtaagccagagcgttaatatcagtcagggaagttccgctggtggtcaggatatcctgcaccatcggtaagattcgttgagtatgttcacgagggcaaagctcaaaatgagcgttgacagtaccgtcgttccacagggcgacagagcaggcctctgtcgcggtatcgatagccagaattcgcatgggtcttcgtgcttagatcaataaaaaggcgcgcatcataccatactccgtaacaaattacctggaggatggtatcgcaaggaaacgaaccgcacgggcaatgtcacgggtgcgtggcgcgggcggcagactggcgagaaacgtcgcgccgtaaggacgcatcaccagccgattgtcacaaatcaccagcacgccacgatcgtcggcgtcgcgaatcagtcgccctaccccctgtttgagagtaatgacggcatctggtagttgcacttcatcgaacgggtcgccaccgcgcaaacgacaatcttccatgcgcgcttttaacagtggatcatccgggctggtaaacggcaatttgtcgataattaccaaactcaatgtatcgccacgcacgtccaccccttcccagaaactgctggttgccacaagaagcgcattaccggcgctgacaaattgctgcaacagttgccctttgctggtttccccctgcaacaatacaggaagcgtcatggtagcgcggaactgctcggccagatcgcgcatcatggcgtggctggtacaaagcataaaacaacgaccgttgttagcttcgatgatcggtcgcagcattgccgctaactggcgagcagaacctggctggttggtttgcggcagattgcgcagcacacagagtaacgcctggcggctgtaatcaaatgggctgggcaacagcaagctctcggcctgttcgatgccaagccggctggtgaaatgatgcagatcgtcgttcacgctcagcgttgcactggtgaagatccagctaccgggtttttgcgccattaactctttgaatttatccgccacgctgagcggcgtgagagccagagtaaaatggcggctagtgcattcgtaccagtagctgtagcccggctgattgatctcttttagccgcttcagccgtgtgcgatacaacgtggcgcgctcaaatgccgcatccagcaaggcggaacgccccagactcagtttcgccacgtcataacaaagttccagggtgtcatcgagcagtaaaaatgcccgctgaatttgcggattagctaacagctcacgcaggttaccgcgataacctggctcaccgagttgcagacgaaaatcctgcgcactctgggcaagacgatcagcgcacttttgtaactgctgggtgtcttttaattcggtgcggtaggcgatggtgatgtcttttgccaggtcgagcagttgtcgactggagagactctgaccaaaatactggctggcaatgtccggtagctggtgggcttcgtcgaagatcatgacgtccgcttccgggatcagttcgccaaatccactctctttaaccaccatatccgccagaaagagatgatggtttaccaccaccacatcggcgtccatcgcttttttacgtgctttgaccacaaagcaatctttatacatcgggcagtcgctgccaagacagttgtcgttggtgctggtgaccagcggccacgcctgactatcttccgccacgctgacgcaggtgctgatatcaccatcgactgtttgattagaccaggagcgcagcaggatcacatcgcttaagatttgtaccggcagatcgccccccgccagcgcctgctgttcgagacgttcgaggcagaggtagttactgcgccctttcagcagcgccacgttgcccgtatatttcaatgccttactgactgttggcaaatcgcggctgtagagctgatcctgcaacgctttactgccggtgctgataatgactttctttttcgcccgcagcgcaggagccaggtaagcgtaggttttgcccgtaccggttcctgcttccaccaccagcggctggcctttttctatcgcctgggtgacggctaccgccatctgtcgctgtggttctcgcggcttaaagcctggtatcgctttcgccagctgaccgtctggtgcaaaatcgtccgtcacactaccccctgttgatttgaacagggattatgtcaggatgagggcgctttcgccagttgaagtggtgacggcgacctcacattgtggcagtctttgcagcacgaaaatggaagtataatgaggacaaaatgatgactatcgttcgtatcgatgctgaagcccgctggtctgatgtagtaatccacaacaacacgctctactacactggtgtaccggaaaacctcgacgccgatgcctttgagcaaaccgccaacacgctggcacagattgacgccgtgctggaaaaacagggcagcaataaaagcagcattctggatgccaccattttcctggccgataaaaacgacttcgcggcgatgaataaagcgtgggatgcttgggttgtcgcgggtcatgcgccggtgcgctgcacggtacaagcgggtttgatgaacccgaagtataaagttgaaattaagattgtggctgcggtgtaagctttatcgaagcaaaataagtcagacgataatttatcgataatactggtcggttttacataaatcgaccagagaataagatattactgttgatgcttctgctaattcattatttatatttataatttcaattttatctataaaactaactatataaataaacataaacatgccgttgtgttcgccctttgattagcaactctggttttctttcttagctgaacaatctggttatagcgtgcggactgaccgttaaatttctccatcttactggataacacaccatgagctgctacctttaaaacacctgaatgtcaacaggttaactcgtgccatatcgttataatccctttgatattagatgcaaattaaggtcatatatagccttatcgataacatggttaattttaaggataagaatatgcctgctgtaatagataaagccctggatttcattggtgccatggatgtaagtgcgccaacaccaagtagcatgaatgaaagcacggcgaagggaatctttaaatatttaaaagaactgggagtacccgcgagtgccgctgatattacggcgcgagctgaccaggaaggctggaaccctgggttcacggaaaaaatggttggatgggcaaaaaaaatggagacaggtgaacgttctgtgattaaaaatcctgaatactttagtacatatatgcaggaagaactaaaagcactggtctgagttaaatttatatcagcataaatgggtcaggacgcttttaatcacatataaaaagcgtcctttttctcacaatcaaatgatcatcggcttctataacgaaatcgatacggattagtgtgttactcgtcttcatcctcaaaacgcgccacgattcgctcgccggagtggttggcacgcagctcttctgccaccagcgcgattgcctggccgctgctcatcccttgtgccatcagttcctggatccgctcgacagctttttgctgctgttcatgggtgagactaggtaaacctgcaaacattgttaactcctgctaaattgttggcgctaattatttcatgctacccggcacatagccagtagagtcaggactgatgaagacgttatctcccgctgtgattactttactctggcgtcaggacgccgctgaattttatttctcccgcttaagccacctgccgtgggcgatgcttttacactccggctatgccgatcatccgtatagccgctttgatattgtggtcgccgagccgatttgcactttaaccactttcggtaaagaaaccgttgttagtgaaagcgaaaaacgcacaacgaccactgatgacccgctacaggtgctccagcaggtgctggatcgcgcagacattcgcccaacgcataacgaagatttgccatttcagggcggcgcactggggttgtttggctacgatctgggccgccgttttgagagtctgccagaaattgcggaacaagatatcgttctgccggatatggcagtgggtatctacgattgggcgctcattgtcgaccaccagcgtcatacagtttctttgctgagtcataatgatgtcaatgcccgtcgggcctggctggaaagccagcaattcagcccgcaggaagatttcacgctcacttccgactggcaatccaatatgacccgcgagcagtacggcgaaaaatttcgccaggtacaggaatatctgcacagcggtgattgctatcaggtgaatctcgcccaacgttttcatgcgacctattctggcgatgaatggcaggcattccttcagcttaatcaggccaaccgcgcgccatttagcgcttttttacgtcttgaacagggtgcaattttaagccttagcccagagcggtttattctttgtgataatagtgaaatccagacccgcccgattaaaggcacgctaccacgcctgcccgatcctcaggaagatagcaaacaagcagtaaaactggcgaacagtgcgaaagatcgtgccgaaaatctgatgattgtcgatttaatgcgtaatgatatcggtcgtgttgccgtagcaggtagcgtaaaagtaccagagctgttcgtggtggaacccttccctgccgtgcatcatctggtcagcaccataacggcgcaactaccagaacagttacacgccagcgatctgctgcgcgcagcttttcctggtggcagtataaccggggctccgaaagtacgggctatggaaattatcgacgaactggaaccgcagcgacgcaatgcctggtgcggcagcattggctatttgagcttttgcggcaacatggataccagtattactatccgcacgctgactgccattaacggacaaattttctgctctgcgggcggtggaattgtcgccgatagccaggaagaagcggaatatcaggaaacttttgataaagttaatcgtatcctgaagcaactggagaagtaagacgtggaataccgtagcctgacgcttgatgattttttaagccgctttcaacttttgcgcccgcaaattaaccgggaaaccctaaatcatcgtcaggctgctgtgttaatccccatcgtccgtcgaccgcaaccggggttgttgctgactcagcgtagcattcatctgcgtaaacacgctggacaagtggcattccctggaggtgcagtcgatgacacggacgcaagtgctatcgccgccgcgctgcgcgaagctgaagaagaggtcgctataccgccttccgccgttgaagttatcggcgtgctgccgcccgtcgatagcgtcactggctaccaggtaaccccagtggtcggcattatcccgcccgatctgccgtatcgcgccagtgaagatgaagtcagcgcggtgtttgaaatgccgctcgcccaggcattacatctgggtcgttatcaccctttagatatctaccgccgtggtgatagtcatcgggtatggctgtcctggtacgaacagtattttgtatggggaatgaccgcaggcataattcgtgagctggcgctgcaaattggtgtgaaaccctgactatacttatctttacatctacaaaacactacttgagacaatcatcgcaatattagttaaatcgcggtttttgattagtttaattcatgtgaatagttaagccagtcgccgcgttccctcttacactatgcgctgttattagttcgttactggaagtccagtcaccttgtcaggagtattatcgtgattagtctattcgacatgtttaaggtggggattggtcccagttcttcccataccgtagggcctatgaaggcaggtaaacagttcgtcgatgatctggtcgaaaaaggcttactggatagcgttactcgcgttgccgtggacgtttatggtagtctgagcctgacgggtaaaggccaccacaccgatatcgccattattatgggtcttgcaggtaacgaacctgccaccgtggatatcgacagtattcccggttttattcgcgacgtagaagagcgcgaacgtctgctgctggcacagggacggcatgaagtggatttcccgcgcgacaacgggatgcgttttcataacggcaacctgccgctgcatgaaaacggtatgcaaatccacgcctataacggcgatgaagtcgtctacagcaaaacttattattccatcggcggcggttttatcgtcgatgaagaacactttggtcaggatgctgccaacgaagtaagcgtgccgtatccgttcaaatctgccaccgaactgctcgcgtactgtaatgaaaccggctatagcctgtctggtctcgctatgcagaacgaactggcgctgcacagcaagaaagagatcgacgagtatttcgcgcatgtctggcaaaccatgcaggcatgtatcgatcgcgggatgaacaccgaaggtgtactgccaggcccgctgcgcgtgccacgtcgtgcgtctgccctgcgccggatgctggtttccagcgataaactgtctaacgatccgatgaatgtcattgactgggtaaacatgtttgcgctggcagttaacgaagaaaacgccgccggtggtcgtgtggtaactgcgccaaccaacggtgcctgcggtatcgttccggcagtgctggcttactatgaccactttattgaaagcgtcagcccggacatctatacccgttactttatggcagcgggcgcgattggtgcattgtataaaatgaacgcctctatttccggtgcggaagttggttgccagggcgaagtgggtgttgcctgtagtatggctgctgcgggtcttgcagaactgctgggcggtagcccggaacaggtttgcgtggcggcggaaattggcatggaacacaaccttggtttaacctgcgacccggttgcagggcaggttcaggtgccgtgcattgagcgtaatgccattgcctctgtgaaggcgattaacgccgcgcggatggctctgcgccgcaccagtgcaccgcgcgtcagcctggataaggtcatcgaaacgatgtacgaaaccggtaaggatatgaacgccaaataccgcgaaaccagtcgcggtggtctggcaatcaaagtccagtgtgactaatacttcttactcgcccatctgcaacggatgggcgaatttatacccgctttctcgtctgctgtaatattccccactacacttccactgttgcgtcaggcgtttgtcgccatacgcttacagggtggcccgcatgcaaaaagcacaacggatcattaaaacctatcgtcgtaatcgaatgattgtttgtacgatttgcgcactcgttacgctcgctagcaccctgagcgtgcgatttattagtcagcgtaacttaaatcaacaacgggtagtacaattcgccaatcacgctgtagaggaattagataaagtactgcttcccctacaggcaggtagcgaagtcttgcttccgctgattggtctgccctgctctgtcgcccatttgccattacgtaaacaggcggcaaaactccaaactgtgcgatccattggcctggtgcaagacggcacactttattgctccagcatttttggttatcgcaatgtgcccgtcgtggacattctggctgaacttcctgcaccgcaaccacttttacgcctgacgatcgaccgtgccctgattaaaggcagtccggttttgattcaatggacgcctgcagcgggcagtagcaatgctggggtcatggagatgattaacatcgacttactgacggcaatgctgcttgagccacaactgccgcaaatcagtagcgccagcctgacggtggacaaacggcatttgctctatggtaatgggctggtagattcccttccgcaacctgaagacaatgaaaactatcaggtttctagccaacgctttccttttaccattaacgttaatggtccgggggctacggcgctggcatggcactatcttccaacacaattaccgctggcggtgctgctaagtttactggtgggctacatcgcctggctggcgaccgcttaccgaatgagcttttcccgcgaaatcaatctgggcctggcgcaacatgagttcgaattgttctgtcagcctttgcttaatgcgcgcagccagcaatgtattggtgtagagattttgctgcgctggaacaatccgcgtcagggctggattagtccggatgtgtttattcctatcgcggaagaacatcatttaattgtgccactgacccgctatgtgatggcagaaaccattcgtcagcgccatgttttcccgatgagtagtcagtttcatgttggcattaacgtcgcacccagccattttcgccgtggtgtgctgataaaagatctcaatcagtactggtttagcgctcacccgattcagcaactgatcctcgaaatcaccgaacgcgatgccttactggatgttgattatcggattgcccgcgagctgcatcgtaaaaacgtcaaactggcgattgatgacttcggcaccggcaacagcagcttttcctggcttgaaacattacgtcctgacgtgctgaaaattgataagagttttaccgcagctataggttctgacgcggttaacagcacggtgaccgatatcatcatcgcgctggggcaaagactgaatattgaactggtggcggagggcgtggaaacgcaagaacaggcgaagtatttgcgccgtcatggcgtgcatattttgcaagggtatttgtacgcacagccgatgccgctacgtgattttcccaaatggctggcgggcagccaaccgccgcccgcccggcataatggacatatcacgcccattatgccgttacgttaacgcttactcatcttcatcgtgcgccggttgctctttaacaatgcgaaccagatcaacacgataatcattggcttcaatgatggtgatatgcagtggccctacatcaatcacatcgcccacacggggaatgtgaccatttgcgctgatcacgaggcccgcgaccgtcgcgatatcatcgtcatcggcaaggtgctcaacatcaagcgcctgctgcaaggcatgcaaatctgtaccgccttttaccagccagccgtcaccatcagtaatgatttccggcgtttcgtcagcgtccgggaattcacccgcaatggcttccagcacatccagcggcgtgaccagaccttgtaccacaccaaactcgttggtcacgataacaaagctcccgcgagcacgacgcagcacgcccaacaggttgatcggatcgagggtttccgggacgataatcgccggagacgcgctagcaatcgccgccacatcaacgccctcttccagcgccaccagcagttctttagcacgtacaataccgatgatttcatccagttcaccgcgacataccgggaacagactgtgcggactagagagcagttgctcgcggatttcatcgaccccgagattagcgtcaacccagcttatttcaccgcgcggcgtcatgatcccgcgcagagaacggctcgccagcgtcagtacgccgttaatcatgtaacgttcttcttcggcaaatgcaccttccgggatcggcatcggcatcgggttatcggcatcgtgctgaacattggcctgacgtttcccgcccatcaaacgcaggatggcatcggcagtacgcgctcgcagcggcaaagtgctctggtggcgaataaagttgcgacgcgcaatctggttaaacacttcgatgatgatgctgaagccaatcgcggcatacaggtaacctttcggaatgtggaaaccgaaaccttctgccaccagactcagaccaatcattaacaggaagctcagacagagcaccaccaccgtggggtgctggttaacgaatcgcgtcagcggtttggatgccagcaacataaccgccatcgcaatcactaccgccgccatcatcaccggcagatggttaaccatccctactgcagtaattaccgcatccaagctgaagacggcgtcaaggatgacaatctgtgtgacgaccacccagaaactggcgtagcctttaccgtggccggaatcatgatcgcggttttccagccgttcatgcagttcggttgttgctttgaacagcaagaatatccccccgaacaacataatcaggtcgcgtccggagaaggagaaatccatgacggtaaatagcggtttggtcagcgtgaccatccaactaatcaggctcagcagccccagacgcataatcagcgccagacttaaccccagcaaacgcgctttatcgcgttgttttggcggcagtttgtcagcaagaatggcgatgaagaccaggttatcgatacccagcacaatttcgagaacaacaagcgtgagtagccccgcccaaatactggggtccattaagaattccatgacaagctcctgcttaaggaatagctattcgacgccagaaataatgcaggcgtaacgacaaaatgcaaacgaaaggtgcggcatagagtgccagaaaggcaggcgttaaaaggcctgatgctgaaatgacgtcggtgacgatccatactgcgggctactgccctatactccatggttgttaaacgggagttaaacatatcagagacgcctctgatttggcaaagatttaccttcctttgcaaacgaatgtgacaaggatattttacctttcgaaatttctgctaatcgaaagttaaattacggatcttcatcacataaaataattttttcgatatctaaaataaatcgcgaaacgcaggggtttttggttgtagcccttatctgaatcgattcgattgtggacgacgattcaaaaatacatctggcacgttgaggtgttaacgataataaaggaggtagcaagtgaccattgctattgttataggcacacatggttgggctgcagagcagttgcttaaaacggcagaaatgctgttaggcgagcaggaaaacgtcggctggatcgatttcgttccaggtgaaaatgccgaaacgctgattgaaaagtacaacgctcagttggcaaaactcgacaccactaaaggcgtgctgtttctcgttgatacatggggaggcagcccgttcaatgctgccagccgcattgtcgtcgacaaagagcattatgaagtcattgcaggcgttaacattccaatgctcgtggaaacgttaatggcccgtgatgatgacccaagctttgatgaactggtggcactggcagtagaaacaggccgtgaaggcgtgaaagcactgaaagccaaaccggttgaaaaagccgcgccagcacccgctgccgcagcaccaaaagcggctccaactccggcaaaaccaatggggccaaacgactacatggttattggccttgcgcgtatcgacgaccgtctgattcacggtcaggtcgccacccgctggaccaaagaaaccaatgtctcccgtattattgttgttagtgatgaagtggctgcggataccgttcgtaagacactgctcacccaggttgcacctccgggcgtaacagcacacgtagttgatgttgccaaaatgattcgcgtctacaacaacccgaaatatgctggcgaacgcgtaatgctgttatttaccaacccaacagatgtagagcgtctcgttgaaggcggcgtgaaaatcacctctgttaacgtcggtggtatggcattccgtcagggtaaaacccaggtgaataacgcggttagcgttgatgaaaaagatatcgaggcgttcaagaaactgaatgcgcgcggtattgagctggaagtccgtaaggtttccaccgatccgaaactgaaaatgatggatctgatcagcaaaatcgataagtaacgtattgtgttgattatcactcagttttcacacttaagtcttacgtaaacaggagaagtacaatggagattaccactcttcaaattgtgctggtatttatcgtagcctgtatcgcaggtatgggaagtatcctcgatgaatttcagtttcaccgtccgctaatcgcgtgtaccctggtgggtatcgttcttggggatatgaaaaccggtattattatcggtggtacgctggaaatgatcgcgctgggctggatgaacatcggtgctgcagttgcgcctgacgccgctctggcttctatcatttctaccattctggttatcgcaggtcatcagagcattggtgcaggtatcgcactggcaatccctctggccgctgcgggccaggtactgaccatcatcgttcgtactattaccgttgctttccagcacgctgcggataaggctgctgataacggcaacctgacagcgatttcctggatccacgtttcttctctgttcctgcaagcaatgcgtgtggctattccggccgtcatcgttgcgctgtctgttggtaccagcgaagtacagaacatgctgaatgcgattccggaagtggtgaccaatggtctgaatatcgccggtggcatgatcgtggtggttggttatgcgatggttatcaacatgatgcgtgctggctacctgatgccgttcttctacctcggcttcgtaaccgcagcattcaccaactttaacctggttgctctgggtgtgattggtactgttatggcagtgctctacatccaacttagcccgaaatacaaccgcgtagccggtgcgcctgctcaggcagctggtaacaacgatctcgataacgaactggactaacaggtgagcgaaatggttgatacaactcaaactaccaccgagaaaaaactcactcaaagtgatattcgtggcgtcttcctgcgttctaacctcttccagggtagttggaacttcgaacgtatgcaggcactgggtttctgcttctctatggtaccggcaattcgtcgcctctaccctgagaacaacgaagctcgtaaacaagctattcgccgtcacctggagttctttaacacccagccgttcgtggctgcgccgattctcggcgtaaccctggcgctggaagaacagcgtgctaatggcgcagagatcgacgacggtgctatcaacggtatcaaagtcggtttgatggggccactggctggtgtaggcgacccgatcttctggggaaccgtacgtccggtatttgcagcactgggtgccggtatcgcgatgagcggcagcctgttaggtccgctgctgttcttcatcctgtttaacctggtgcgtctggcaacccgttactacggcgtagcgtatggttactccaaaggtatcgatatcgttaaagatatgggtggtggcttcctgcaaaaactgacggaaggggcgtctatcctcggcctgtttgtcatgggggcattggttaacaagtggacacatgtcaacatcccgctggttgtctctcgcattactgaccagacgggcaaagaacacgttactactgtccagactattctggaccagttaatgccaggcctggtaccactgctgctgacctttgcttgtatgtggctactgcgcaaaaaagttaacccgctgtggatcatcgttggcttcttcgtcatcggtatcgctggttacgcttgcggcctgctgggactgtaagactgttgtacactaccggggccttttggccccgtttttttatctggaggattaatgacaatcacggacctggtactgattcttttcatcgccgcactcctggccttcgcgatctacgatcagttcatcatgccccgccgtaacggccccaccctgctggcaattcctttgctccggcgtggtcgcatcgatagcgttatcttcgtcggattgattgtcattcttatctataacaacgtcacgaatcatggtgcgttaataacgacatggttattaagcgcactggctctgatgggtttttatatattctggatccgcgttccgaagatcatctttaaacaaaaaggttttttcttcgccaatgtctggattgaatatagccgaatcaaagcgatgaacttgagcgaagatggcgtgttggtgatgcaattagaacagcgtcggctgttaatccgcgttcgaaatatcgacgatctggaaaaaatttataagcttctcgttagtactcaataagttatgaatttagccaaagctatgtttagtgtatttttaataatcagacatagcttaggctatattacctcttcccttatttgttatttattttaacgtttcattgatatataaatccaaatgaaaatcgttatcaataaagcaatgaaataatatattccaacagttgttttatattctcaaaatatgttaaggttgcgccctcatttggggagtagccgatttccagattccggaaatgtacgtgtcaacatactcgttgcaaaacgtggcacgtacggactgaatactttcagtcaggcgagaccatatgcacatcaatcgctatgcctgcatgaacgcgaaaaccatcacggcttgttgttcatgtatgcatgtttgctgggggcgatgatgtgttttatggataccccggtcaggacattgtcatgaatatcactgctactgttcttcttgcgtttggtatgagcatggatgcatttgctgcaagtatcggtaaaggtgccaccctccataaaccgaaattttctgaagcattgcgaaccggccttatttttggtgccgtcgaaaccctgacgccgctgatcggctggggaatgggcatgttagccagccggtttgtccttgaatggaaccactggattgcgtttgtgctgctgatattcctcggcgggcgaatgattattgagggttttcgtggcgcagatgatgaagatgaagagccgcgccgtcgacacggtttctggctactggtaaccaccgcgattgccaccagcctggatgccatggctgtgggtgttggtcttgctttcctgcaggtcaacattatcgcgaccgcattggccattggttgtgcaaccttgattatgagtacattagggatgatggttggtcgctttatcggcagtattattgggaaaaaagcggaaattctcggcgggctggtgctgatcggcatcggcgtccagatcctctggacgcacttccacggttaataagaacgctgccagaggtgaatattaaagtccgtctggcagtcgaacacttcttttgctgccagtgtttgccagacttctggcttcgcacgccaggcaaacggcgtcatctgcaataatgcgacggcttcatcaccgcgaagacgcatcggataacacaactccgcactctgctgtaatgtaaaaccttccagttgttctgcatgaggtgcatgaagatgtacttcattgtaaatcagccccttcagctccatcaaatgtcgcggtcccggcgtggcagtaatgacccagccgccgggcttcactactcgtgctaattcttctgctttacacggcgcgtaaatacgtattatggcgtccatactggtatcggaaaacggcaaacggtggctggaagcgacacaaaaagtgacctgcggatagcgtttcgccgccgcttttatcgctaccttgctaacatccagaccaaacgtggtgatttcgggcaacgcatcggcaaatgcgtgtgtgtaatacccttcaccacagccaatatccagcaccgccgtggccttatcatcaagccgttccctcagttgggcgacaattgcatcacgcagcggctgataatgtccggcatctaagaatgcgcggcgtgcttgcatcatttccgcgctgtcgcccggatcacgagaccgtttatgctgaacgggcagcagattgacatacccttctttcgccatatcaaactgatgtcgctggggacagatatagctgtttttttcacggctaagaggctgatggcaaagtggacaggaaaaagacatgacaactccggcaggatactaaaggccgcaagtgtaacgcgaatcacgcggcgggcaaatatccgaacgccaggagcgaagataaagcatagtaaaaagcctcgcattcgacgaggctttatagcgagattgaagcgtattcacacttcagatcagtggattcgatcagatagctgttacgttaacagctgccggacctttctggccgtcctgaatttcgaactcaacgttctgaccttcagccagagttttgaagccattaccctggatagcggagaagtgtacgaacacatctttgctgccatcagccggagtaatgaagccaaaacctttagactcgttgaaccacttaacctgacctttaatctttgccatttgaaaaattccttagattgttttcttcgcccgcaggcataacatagataaaacactcacattactgcaactggcaccaatataaggctcggcagagaagcggtattcaacgtcaacgtgtttactcaggacttctttactgaaaatgccacacataaacagaactgtacctcgtttaacccgaaatctgttatcacatacaacgttaattatggcaagccatttttaaacatgtctcgatcagacgcacaaatctcgatacgtcttccactttttttgcacacttatgcaacggaatacgcgccgatatatcattgtgcttaaccttgccagttcaggcagatacttaaactggcgtattttctaacatagttcaataagttcagttgttccaggccagtgggagaagttattacatagtgcgtgcaatatcacattttttgctatgcaatgaataaaaagttatatcactttttctcataaaacagtcagttaacggctattaattaccctaaagagaagtcaatccccaaagggattgtaaatttaaaataagaaaaattgatgaatgagcaaaaaaatcaagagagaaacgtttcgctaataaataataccacgcttaatcacaaatccgatgtaaacatcctaataaattaatggggtaaatatctttttctgatatcccgttacgcaaataaataatatgataattatttgaagtcagaccagagttttaatttgaagcagttgcaccatgacagtgcgtataatcaggatgaattgagtaacccttcaacgacggggttactcaagattgaggaaggattatcgttcggcgaccagacgaataatatcttcgtcttcaacgcttttttgactctcaacggtctttttatctgctttctctggttcgtttgcttcgcacaaacgacgtaacagtgcattttgacgtttttgctgatccagcaacgcctcaagcagttcaatctgttcgttagtccgactactggcacgattgataaaaaaccacaagatgagcccgataagaagaaccaccacgcttacaaccaaagacgcaatgttcatcacgccactatttacaacttcgttcatttcaccacctctgagtagaggcgctattctaccactgctggagaggaagaaaatctagtgctgaaaaaatgatatcaccacgggataaactggttaatggcacaaattccgctgaaaaattgtacatcctgatcgcacatcatgttgaatacctgcgcccaaagcagcaagcaagccaacaccacgacaaccagaacgacccatcgaaactttttcactccaatctccgtttcacctaccttatgtcattaaactagcatgcgttagttaaacagcgcctaactatgtcgatattcgtgctttttcggaatgagtcgcttgcttcagcgcatattgccgctacgattaagcgaacataaaaagagaagaggttgtaatgcgattcatcattcgcacagttatgctgatagcactggtatggataggattattactcagcggatatggcgttttgattggaagcaaagagaatgccgcaggattaggtttgcaatgtacctatctgactgccagaggcaccagcacggtacaatacttgcacactaaaagtggttttttggggataacagattgcccgctgttacgcaaaagcaatatcgtggtcgataatggttaagggcaataaataaccagattctcactcctgagtaaaatactcttatagcaagcgcgtttaatataacgccaccttcaactttatttttctcatgctaaataaagaacctgtctgtttgatattccgacaggttcttactctcatcagaacggatagtcgtgataacccatttgggcagaaattttgcgcgctgcggtatgcaacattgcgacatattcctgtaaacgctcttcagagaaacgcaacgtcgggaaggagatgctcaaaccggcaatgaccacgccaaagcgatcaaataccggtaccgcaatgcatcgcagcccttcttcctgctcttcattatcttcgccatacccctgctcgcgcacctggtccagaacgggtaataacgcttctgtactggtgatggtccgctcggtactgcgtttatactccacgccctcaagaatttgcttcacttcatcgcgatcgcgccatgccagcagtaccttaccaatcgcggtgctgtacagcggattacgacgcccaatccgactatacatgcgcaaattgtacatagagtcaattttgtgaatgtaaacaatactgtcttcgtccagtgcgccgaggtggatagtttctttggtcaggcgggagagctcacgcatctggatatctgcgctacgaattaaatcgacgttttgtaacgcgcgagcgcccagttcaaacaatttcagggtcagggaatatttctcgctctccccttcctgcgccacataacctaaggttttcatggtctgtaaaaagcgataaacggtgcttttactcatcatgacgcgctggctcagctcggttatccctatttcgcgctcttcacccagcgcctgcaaaatgccaaaaacttttagcacggaagatacagaatcaggctgtttatccagatctgcgttagccatttatcacctcattgcgagtgttttataaaaatcagaactgttttttattataatttcgcaccagggtggtcgcaatccatcttttgccggttagttacaattctgcgacatccaccgtgaatatcagtgctagaatcatacccctgttgattattcaccaaagatataaaattcctatgccaaaagttcaggccgacggcctgccattgccccagcgatacggtgcgatattaaccattgtgattggtattagcatggccgtccttgacggcgcaatcgccaacgtcgccctgccaacaatcgccacggaccttcatgccacgccagccagttccatctgggtagtgaacgcctatcaaatcgccattgtcatctccctgctcagctttagctttctgggcgatatgtttggctatcgacgtatttataaatgcggtctggtcgtttttctgttgtctagtctgttctgcgccctttctgatagcctgcaaatgctcacccttgcgcgtgtcatacaaggtttcggcggtgcagcgttgatgagcgttaataccgcacttatccgcctgatctatccacaacgttttctgggtagagggatgggcataaacagctttattgttgccgtctcttctgctgccgggccgacaattgctgcagcaatcctctccatcgcatcctggaaatggttatttttaatcaacgtaccgttaggtattatcgccctgcttctggcgatgcgttttctgccacccaatggttctcgcgccagtaaaccccgtttcgacctgcccagcgccgtgatgaacgcgttaaccttcggcctgcttatcactgcgttgagtggtttcgctcaggggcaaagcctgacgttaattgctgcggaactggtggtaatggttgttgttggtattttctttattcgccgccagctttctcttcccgtaccgctgctaccggtggatttactgcgtatcccgctgtttagtctttctatttgcacatctgtttgctctttctgcgcacaaatgctggcaatggtttccctgcccttttacctgcaaaccgtgctcgggcgtagtgaagtcgaaacaggtttacttctgacaccgtggccgttagcaacgatggtgatggctccgctggcaggctatttgattgaacgcgtacatgcaggattgctgggggctttagggttgttcatcatggctgcggggcttttttccctggttctgctgcccgcgagtcctgcggatatcaatattatctggccgatgatcttatgtggtgctggatttggcttattccagagtcccaataaccacaccattattacctccgcgcctcgcgaacgtagcggtggagccagtggcatgttaggaacggctcgtctactgggtcagagtagcggcgcggcgctggtggcgctgatgctaaatcagtttggagataatggtacacacgtcagcctgatggctgcggctattctggcagtgattgctgcctgtgtcagtggtttacgtatcactcagccacgatccagggcataaaaaaagcgcgtcgatcaggacgcgctttttagtatttacttcatattacttcaggtattcacccgtacgcagagcttcaattcgtttatccagcggcgggtgggtcatgaacaactcactgaggcttttgctcttaccgttaatgcagagagccatcatgctggttgcttcttgcggttcatagctggttttcaggcgctgcagcgcggcaatcattttctcgcgaccaaccagttttgcgctaccggcatcagcatggaattcacgatgacggctgaaccacatggtgataatgctcgccagaataccaaacaccagttccagaaccgttgcaaccgcaaagtagatcagcgggttgccgttgctctcttcaccttcatcacgatttccgcccataaaacccgcggcaagctgcgccagaatacgggaaataaagataacgaaggtgttcaccacgccctgaatcagcgtcatggtgaccatatcaccattggcgatgtggctgatttcgtgagcaattaccgcctcggcttcatccgggctcatgttctgcagcaaaccggtgctgacagcaaccagagaggcatcacggcgcgcaccggttgcaaaagcgttgatgtccggcgcatggtagatagccacttgcggcatagcgatccccgcctgacgagcctgggttgctacagtattgaccagccaacgttccctttcgttacgcggttgctcgatcacttccccgccaacagatcgtaatgccatccatttggacatcagaaggctaacgaaggaaccaccaaaaccgaacagcaaggccatgatcatcagcccctgaacgctgctgctctgtatccctgtcaggctcagtaccagcccgaaaacgaccattacggccaggttcgttagcaggaagagcgcgattcgcatcataattttctttttacctcagtttaacaaaacgcaatatgcgatacccacatcgtatgggttacgcgactattttcaagtctggatagtgcgtaagtcaccagaaagacacaactttacattttgtagcatctgatttacggcatcttgtcgctgttaaaaaatcaggcacaatttcttgtgcctgattgatattacttgacgggagcgggttgttccgcgggtctggctttttcaagcttcgccagatcgagtgcgatattcaccgtctcatccagataaggatccggctcctggtaatctttcggtagatcatccagtttcttcaactccggtttaccttcgcgtttaaagcgttcgttcaaacgcgccagacgcgtcgcatcatcttcattattctctttctcacgcacagcgtaattcagagaaacgatattgcgcttgtccttcatagcgttgaagcgcgcgatatccttcatgatgttctggaactcaggatctttcgcgatacgcgcattatgttccttcagcagctccggttcaaaggccgttaaatctccacttttcacataagtcgcggcatcaatgctatcccacggcagcgcgttatcttcgaatttctcacccgtttccgtttcttcattacccgtcggcatgatgatgtctggcgttacgcctttacgttgcgtactgccgccgttaacgcgatagaatttctggatcgtgtactgcacagaacccagcgctggccattcaggacgtaacatctgatcgtaaatacggttcaaactacggtattgctgaacggtgcctttaccaaacgtcggttcacccacaaccagcgcacgaccgtaatcctgcattgccgcggcaaagatttcactagcgctagcactgaagcggtcaaccagcaccaccagcgggcctttatagaaaacctgtccgtcggtatcgctatcttcacgaaccttgccgttgttatcgcggacctgaacaatgggacccgcaggaataaacagaccggagaggcttacggcttcagttaacgccccaccgccattgctacgcaggtcgatgatgacgctgctgacattctgtttttccagtttctgcagttgcactttgacatcgtctgtcaaacccacatagaagcccggaatatccagcacgccgactttctctttaccgacggtcttcacgctcattttaaccgcgcggtcttcgagacgaatacgttcacgggtcaacgttacagtacgggtcttggtccctttaccagcaggtaaaatttccagacgaactttactgcccttcggccctttaattaaggcaaccacatcatcaagacgccagccaatcacgtcaaccatcggcttgcctgtttgaccaacaccgacaattttgtcaccaacgctgatagctttactcttcgctgccggaccacctgccaccatgctattgataacggtgtagtcatcatccatttgcagcactgcgccaataccttccaggctcaaactcatttcagtgttgaactgttcggtattacgcggggaaagatagttggtatgcgggtcgatttcacgcgcaaacgccgtcattgccaggctgaaaacatcttcgctgttggtttgcgccagacgacgaatggcaaatttgtagcggcgagtcagggtttcacgaatttctttatccgtttttcctgtcagcttcaggcttaactcgtcgaatttgactttactgtcccacagcgcgttcaactcagcctcgtttttcggccagggcgctttgctgcggtcaaggttataagtgtcgttgccggtgaaatccatcggcttttccagtacgctcaaagcgtactggtaacgctcaaaacggcgcttttgcgccagattgtagagatcgtagaaaacgtcgagtttgccactacgcagttcatcgcctaactcggttttctttttcgcgaactgttcaacatcgcttgccagcagcacgttgtggctgtaatcgagcagattcaggtagcggtcaaagattttggcgctaaatgcctgatcgaggtcgaactggcgataatgagaacgggtgaagcggctcgttacgcgctcacttaccgtcgcatgctgcgtctcttcctttaataccggaatttgatcagcacgcgtgatatcttctacagcgaaggtctggcctgctattgcaagcaggccagctaacgcggtaagcctaaaaaacatgttcatgcctggcccggcctccgtttcagaacaccaggtgttctgcgcgcacaatcaaagacataccgctattcagctggacgcggacgccgtctttggtgatttctaatacggtggcatccatcgcgttttgacccgctttcaccttcagggcttgtccgacagtcagagcactaatgtcagaaaccggggtgtgctgttcttcgcgaggtgcttttactgtttttggcgctttctctaccggcttttgcgcacgaggtttacgttcagcgccttctttgcggcgtggcgtagtcggacgtggcttgcgttcgcggcgcggtgcgtcttctttctcaccagcagttgcggcagcttcgcgttttttcgcttgctgttcagcacgctgtgcctgaacacgcgctttcgcttcttcaagctgcttgcgagcatgctctacatgttgctcgtccagctcaccgcatgggttgccgtcaagatcgacacgcgttgcgccgggtttaacaccgtaaagataacgccagctgctagtgtagagacgtaaagcggatcgcaattgcgttttgctcaggttcatttccccagcaacacgatcgaccaaatcctgaaaaataccgattttcagcggacgcgcttcaccttccgcactgaaacagtggggaaaacgttcggccagaaacgcgattacttctttactgctattcaacttaggttgattttccatgaaatttcctgattacaacggacgtagccaacaagcgcaggcatgaacaggcgtcattataatgacgctatcagtaaatgctacgttatccgttgattatcctgcgacgctcgcaaagaattttttgtaatccgtcgttgcaagcactttttcaagctgtgccacaagctgacgtaagccttgctcgtcctcgtctgtaaagcgaccgaagacggtactatcgatgtcgagaacaccaataatctgatttttcaccaccagcggcagaacaatttcagaattactcgccgcatcacaggcaatatgcccgtcaaacacatgaacatcctcgatacgctgcacttgattgcgggcaaccgcagtgccgcacacgccgcgcccgacgggtatccggacacaggcaattttgccctgaaatggtccgagtaccagtgtatcgtcctcaagcaaataaaaacctgcccagtttatgtcagtgagacgctcatataacaacgcactggtgttcgcaagcgttgccagaaaactggtttctcccgccatcagcgcgttaaagtcgcgatttaaatccgcgtaaaattctgttttgttcattatataatcacttggttgtcttacctggatctgccagcctattaaaataagcattaaatgcgttaatgctcaagatcattcccatcatgggttaagattaatgttaattcttattacatttggcacgtcatggctcttaacacaccacaaattacgccgacaaaaaagataacagtgagggcaatcggcgaggaactgccgcgtggtgattaccaacgttgcccgcaatgtgacatgctgtttagcctgcccgagataaattctcatcaaagtgcctattgtccgcgctgtcaggcaaaaattcgtgacgggcgcgactggagcctaacgcgcctggcggcaatggccttcaccatgctgttgcttatgccgtttgcctggggcgaaccgctgttgcatatctggctgttaggcattcgtattgacgccaacgttatgcaaggcatctggcaaatgaccaaacagggcgatgcgataacggggagcatggtctttttctgcgttattggtgccccgctcattctggtgacctccatagcttatttatggtttggtaaccgactgggaatgaatttacgtccggtactgctgatgcttgagcgacttaaagagtgggtaatgctcgatatctacctggtcggcattggcgttgcttctataaaggtacaggattatgcccatatccaggctggtgtcggcttgttctcttttgtggcgttggtgattttaacgacggtgacgttgagtcatcttaatgtcgaagaactgtgggagcgattttatccgcagcgccccgctacgcgtagggacgagaaacttcgtgtctgtcttgggtgccattttaccggctatccagatcagcgtggtcgctgcccgcgttgccatatcccgctacgcctgcgtcgccgtcatagtctgcaaaaatgctgggcggcgctgttagcgagtatcgttttattgttacctgccaacctgttgcctatttctatcatttatctgaacggaggacggcaggaagatacaattctttccggaattatgagcctggcaagtagcaacattgcggttgcaggaatcgtgtttatcgccagtattctggtaccgtttactaaagtgatcgtcatgttcactttactgttgagcattcattttaaatgccagcaaggtttacgcacacgcattctgttactgcggatggtgacctggattggtcgctggagcatgctcgacctgtttgtcatatctttaaccatgagcctgattaatcgcgatcagatcctcgcttttactatgggaccggctgcgttttatttcggcgcagcggtaattttgactattcttgctgtggaatggctggacagccgcttactttgggatgcacatgagagtggaaacgcccgcttcgacgactgaataaccgcttactttgggatgcacatgagtcaggaaacgcccgctagcacgactgaagcgcagattaaaaataaacgccgtatcagtcctttctggctgctgccgttcatcgcgctaatgattgccagttggctgatttgggacagttatcaggaccggggtaataccgtcaccatcgactttatgagcgcggatggtattgttccaggccgtacgcctgttcgttatcagggcgttgaagtcggaacagtgcaggatatcagcctcagcgacgatcttcgtaagattgaagtcaaggtcagcatcaagtccgatatgaaagatgcgctgcgcgaagagactcagttctggctggtgacgccaaaagcaagcttggcaggtgtctccgggctggacgccctcgtcggtgggaactatatcggcatgatgccgggtaaaggtaaagagcaggatcactttgtcgcactcgatacccaaccgaaatatcggctggacaatggcgatctgatgatccacctgcaagcccccgatctcggtagcctgaacagcggtagtttggtctatttccgcaagatcccggtgggaaaagtctacgactatgccatcaatcccaacaagcaaggcgtggtgattgatgtcctgatcgagcggcgttttaccgatctggtgaaaaaaggtagccgtttctggaacgtttccggcgttgatgccaacgtcagtatcagtggcgcgaaggtgaaactggaaagcctggcggcactggttaacggtgcgattgccttcgatagtccagaagagagcaaacctgccgaggcggaagatacctttggtctgtatgaagatctggcccacagccagcgtggcgtaataataaaactggaactgccgagtggggccggattaaccgccgacagcacgccgttaatgtatcaggggctggaagtcggacagctgactaaactggatttaaatcctggtggtaaagtcacaggggaaatgaccgttgatcccagcgtcgttaccctgcttcgtgaaaatacccgcatcgaattacgcaacccgaaattatcccttagcgatgctaatctcagcgccctgctgaccggcaaaaccttcgagctggtgcccggcgatggcgagccacgcaaagagttcgttgttgtgccaggcgaaaaagcactgctgcatgaacctgatgttctgacgctgaccctgaccgcgccggaaagttacggtattgatgcgggtcagccgctcattcttcacggcgtgcaggtaggccaggttatcgatcgtaaactcaccagcaaaggcgtcacctttaccgtcgccatcgagcctcagcatcgcgaactggtaaaaggcgatagcaaatttgtcgtcaacagccgtgtcgatgtgaaggtggggctggatggcgttgagtttctcggtgccagcgccagtgaatggatcaatggcgggatacgtattctgccgggcgataaaggtgagatgaaagccagctatccactgtatgccaatttggaaaaagcgctggagaacagccttagcgatttacccaccacaaccgtgagtttgagtgcagagacgctgccggatgtgcaggcaggaagcgtagtgctgtaccgtaaatttgaagttggtgaagtgattaccgtgcgtccgcgagctaacgcgtttgatatcgatctgcatattaagccggagtatcgcaaccttctgaccagcaatagcgtgttctgggcagaaggcggggcgaaagttcagctgaatggtagtggtctgaccgtacaggcatccccgctctccagagcattaaagggagccattagcttcgacaacctcagcggtgccagcgccagtcagcgtaaaggcgataagcgtattctgtatgcttccgaaacagcggcccgtgcggttggcgggcagattacgcttcacgctttcgatgccggaaaactggcggtcgggatgccaattcgctatctcggtattgatatcgggcaaatccagacgctggatctgattaccgcacgcaatgaagtacaggcaaaggcggtactttacccggaatatgtccagacctttgctcgcggtggtacgcgcttcagtgtggtcacaccgcaaattagcgcagctggcgttgagcatcttgatactatcctccagccgtatatcaacgtcgaaccaggccggggcaatcctcgccgcgactttgaattacaagaggccaccattactgatagccgttacctggatggcttaagcattattgttgaagcgccggaagccggtagcttaggcatcggtacgcctgtgctgttccgtggtctggaagtcggtacggttacaggaatgacgctggggacattgagtgatcgcgtgatgattgcgatgcgcatcagtaaacgctatcaacacctggtgcgtaacaattccgtcttctggttggcaagcggttacagtctggactttggtctgacgggcggcgtagtgaaaaccggcacctttaaccagtttatccgtggcggcatcgccttcgccacgcctccgggtacgccactggcaccgaaagcccaggaaggcaaacacttcctgttgcaggaaagtgaaccgaaagagtggcgtgaatggggaactgcgcttcccaaataatgcccactgctccggcgtgcctgcgccggagcgtttatgctaaactgcgcgcctgtttttttgccagtggtacatgctcgtggcccaacacaccgtttatttcccggacgcctttctgacacaaatgcgcgaagcgatgcctagcacgctcagttttgatgattttcttgccgcctgtcagcgcccgttgcgccgcagcattcgcgttaatacgctgaaaatctccgttgctgatttcctgcaattaaccgctccttatggctggacgcttacgccaattccgtggtgtgaagaaggtttctggattgaacgcgacaatgaagatgcattgccattgggtagtaccgccgagcatttaagtggcctgttttatattcaggaagccagtagtatgttgcctgttgccgccttgtttgctgacggtaatgcaccacagcgggtgatggatgtcgctgccgcgcctggctccaaaacgacgcaaatttccgcgcggatgaataacgaaggggcaatccttgccaatgagttttccgccagtcgggtaaaagtgttacatgccaatatcagccgctgtggtatcagtaatgttgcgctcacacattttgatggccgcgtgtttggtgcggcagtgccagaaatgttcgatgccattttgctggacgctccctgctctggcgaaggcgtggtgcgtaaagatcccgatgcgctaaaaaactggagtccagaaagcaatcaggaaatcgcagctacacaacgggagcttatcgacagcgcctttcatgcattacgtcctggtggtacgctggtttacagcacctgtaccttaaaccaggaagaaaacgaagccgtttgcctgtggctgaaagagacttaccccgacgcagtagagtttttaccacttggcgatctcttccctggtgcaaacaaagcgctgaccgaagaaggctttttgcatgttttcccacaaatttacgactgcgaaggcttcttcgttgctcgtctgcgtaaaactcaggcgattcccgccttacccgcccccaaatacaaagtcggtaattttccgttcagcccggtgaaagatcgcgaagctggacaaattcgtcaggcggctacaggtgttggcttaaactgggatgaaaacctgcgcctctggcagcgtgacaaagaactgtggttgttcccggtgggcattgaagccctgatcggtaaagtccgattttctcggttggggattaaacttgccgagacgcacaacaaaggttatcgctggcagcatgaagcggttattgctcttgccagtcccgataatatgaatgcattcgagctgacaccgcaggaagcggaggagtggtatcgcgggcgcgatgtttacccgcaagccgcgccagtggcggatgatgtattggttactttccagcatcaaccgattggtttagccaaacggattggtagccgattgaaaaacagctatccgcgtgaactggtgcgcgatgggaaactttttaccggtaacgcctgacagcgcacaaaaaaagcgcactttttgactggcacattcggctgcctcaactaggctgaaaaatggtgcgatcggactggtcgtaccacaatcggcagctaaatggagagcacgaagatgaaaaccagtgtgcgcataggcgcttttgaaatcgacgacggcgaattacacggtgaaagcccaggtgatcgaacgttaaccattccttgtaaatctgaccccgatttatgtatgcaactggatgcctgggatgctgaaaccagtatccctgccctgctaaatggcgaacactctgtcctttaccgtacccgttacgatcaacaatctgatgcctggattatgcgtcttgcctgatccaaaaagaacccgtcggcatggcgggttatttgtcctggttattcccccgttgtaaaatctctcctaaacttaacggtacggcaccacacttcggggatgaaatgttcgcgctggtactttttgtttgctacctggatggcggttgtgaagatattgttgtggatgtctacaacacggaacagcagtgtctttattctatgagcgatcaacggatccgccagggcggttgttttccgattgaggattttatagatggtttctggcgacctgcacaggagtacggtgatttttaattattgcaattgcacaagagtcagttcgcccccaaagacagcaccggtatcaatataatgcaggttgccaatatccacgcgatgtcgcaacggtgtatgaccaaaccagaaatgatcagcacctgtaattccctgccctttttggcgttcacctaatcggctgcggctccacaagacctgatgcaaatcaacgtccttttgccattcataaacatcatctggataatcggcatgagcaataatatgcttgccggtgcgactgtgtacttcaagaataaagggcaaatgctgacatttttccagcgccgttttcgcttgtttctgttgattatctgccagcgcaataaaccagtcgccgccattcatcaaccacaaagacatctgctgggatgccagcgcatccatcgccatctgttcatgattgcctcttaccgcacaaacccaatgttgttccagtaactgcagacaacgtaaactttgcggcccacgatcgataacgtctcccacactgataagtaaatctcgccacggatcaaaacgacaatgccataatttgcggcgcaactgctcaagacaaccgtgtatatcgccagaaagccagatatgtcgccattgatgacccgcaattctctgataaacgggcgcaggctgtttcatcaatattttcctcccgcgctaaagatcacataatcttaacaagaatgttaaaaaacgctggactcagacagtagagtgtgtgttatggttgactataaagtcagcgaaggaaatgcttctggcttttaacagataaaaagagaccgaacacgattcctgtattcggtccagggaaatggctcttgggagagagccgtgcgctaaaagttggcattaatgcaggcttagttgccttgccctttaagaatagatgacgacgccaggttttccagtttgcgtgcaaaatggtcaataaaaagcgtggtggtcatcagctgaaatgttaaaaaccgcccgttctggtgaaagaactgaggcggtttttttattggaaatcaaaaggctattttaggtaattaacagagtttttcagctcgttctataaacggtgccagactcattttttcgccgggattgttaggatcatcaatctgaatcacgctaatgggttgggcattggtcttcccactggcaacttccttttgtgcgatatcgtttaaaggatactgcacgagggtactcggattaataacatacaaagcattacccggtcggcaagtcagcatcacctcttcgcgattaaacgcccatttgtctttacccacttcaaaacgactgacggtaatcacctgcggtgcagccagcgccgctgcagaactggtgagtaacagaaacgccagaatactttttttcatcattttcgtaatccatcaaaaaggttcgagagtcgcaagcaggctgatgatcaccagcactaccgcacctatcgcccattcgagtttagtcatccacacaaaccagggtgccgcacgatcttcatcctgcctcatgcgcggtacaagaacataacgattagccagcgcaatgaccaccataatcatcaccaggatggctttgagcaataagagttggccccagtaagtcgtaagcgtggggggaaatccggtaatcaacaatgcattaagcacgccgcttgccagtacgccgatcaccgcaaaatgcccgcaccaggaaaaacgcatcagcgcctgaatagcctggtgtcgccaacggcctttgatgagttgcatacaccagagcaccggcagtaatcccccaaaccacgccgccgcacaaatcaggtgaatcgcgtgattagtctgatggattttcgctgttaccccttcattcagcgtcgcatgccccactcccgccagcagaataaattgcgcggtagtgagcataaacagcaaacgtggcatattccgcggttgcataagggcgacgatcaacgttacgagggcgagaacaatttgccataaccagatgccaccaaactgcgtttgcaaaacagcctgccaaatgtttgggctaaatacatctgtccatcccgttcccatcaacccgccctgaacggcgagcattgcagtggcactgatcaaactccagacggcagcgtgctgttgtaaacgcagaaaacgcttcgccagcaagcgacgaatcgtcaagggggccagccaggcaccgtacattgcgaagccaaaaaccagcatcaggctggtgaaatggataaatcgcagcgcgatccaggtaaacgccagcatgatttatttcacgctaaaggtgtagtgtcctttcgttttatgcccgtccacgctaacaacatgccagtcaacggtgtaggttccgggtttcaggctatcggccagtggaacaatcagttgcttttggtcctgctcatttcgcttcgccggtaatgttttaatattttcgttttttggccccgtgatttttgcaccactgaatcctgtttcaacaccttcgctgaagtttaaagtgattgcctgcggtgcagctgtcacttgcgcgtttgccgcaggatactgatgcgttaaatgcgcatgtgcccagacggaaggtgtcaccaagctagtggtcaggattgccagcgcgtagcgaagggagcgtgcagtactagccatattatctattcctttttgtaataacttttttacagagcataaccttgtctaatgtctgagtcgaggatcatcaattccggcttgccatcctggctcactcttagtaacttttgcccgcgaatgatgaggagattaagaatgctgaagaatctggctaaactggatcaaacagaaatggataaagtgaatgtcgatttggcggcggccggggtggcatttaaagaacgctacaatatgccggtgatcgctgaagcggttgaacgtgaacagcctgaacatttgcgcagctggtttcgcgagcggcttattgcccaccgtttggctagcgtcaatctgagtcgtttaccttacgagcccaaacttaaataaaacttatacagagttacactttcttacataacgcctgctaaattatgagtattttctaaaccgcactcataatttgcagtcattttgaaaaggaagtcattatgagcttctggaaagttgcagcagcgcaatatgagcctcgtaaaaccagtctcaccgaacaggtagctcatcatctggagtttgtgagggccgccgccaggcaacaatgtcagctgttagtttttccaagcctttctttactggggtgtgattatagccgacgtgcccttcctgccccacccgatctcagtctgttagacccgctttgttatgccgcaacgacctggcgaatgaccatcattgccggccttcccgttgaatataacgatcgctttattcgtggaattgcggtgttcgcaccgtggcgaaaaacgcctgggatctaccatcagagtcatggtgcatgtctgggccgtcgttccagaaccatcacggtggtcgatgaacaaccgcaaggtatggatatggacccgacctgtagtctgtttactacagggcaatgtctgggagaacccgacctgctggcgagcgcccgtcgcttacaattttttagtcatcagtacagcattgccgtgctgatggcaaatgcccgtggtaacagtgcactatgggatgaatatggtcgtctcatcgttcgcgccgatcgtggtagtttattgttagtcggtcagcgtagtagtcagggttggcaaggcgatatcattccattacgctaagctttttcggcctggagcatgccatgttgcgcattatcgatacagaaacctgcggtttgcagggagggatcgttgagattgcctctgttgatgtcattgacggaaaaatcgtcaaccccatgagccacctggtgcgccccgatcgtcctattagtccacaagcgatggcgattcatcgcatcaccgaagccatggtcgccgataaaccgtggattgaagatgtgatcccacactattacggtagtgaatggtatgtcgcgcataacgccagctttgaccgccgcgtactgcctgagatgcccggtgagtggatttgcactatgaaactggcccgtcgtttgtggcctgggatcaagtacagcaatatggcgttatataaaacacgcaagctcaatgtacagacgccgccgggcctgcatcatcaccgcgcgttgtatgactgttatatcaccgccgcgttgcttatcgatattatgaacacctccggctggacggcagaacagatggccgatatcaccggacgtccgagcttgatgacgaccttcacctttggcaaataccgtggcaaagcggtttccgacgttgccgaacgcgatccgggctatctgcgctggttatttaataacctggacagcatgagcccggagctgcgtttaacactgaaacattatctggaaaatacttaatccgcaggcgtagcgggtaatgttccctgcgccagcgcgaccagaaaagcatattccatcgctacgccttcgtagcttttaaagcgaccagatttaccgccatggccactgtccatgtcggtacagagcaataaaagatggtcatcggttttcagctcgcgcaatttagcgacccattttgccggttcccaatattgcacctgagaatcgtgcaaaccggtcgttaccagtaaatgcggataagcctgtgcggtgacgttgtcatacgggctgtagcttttcatgtactcgtaatattgcggatcctgcgggttaccccactcttcaaactcaccagtggtaagaggaatactttcatcaagcatcgttgttacaacatcaacaaacggtacctgggcgataacgccgtggaataattccgggcgttgattaattgcaacgcccatcaacatgccccccgcactcccgcccatcgcataacaaaggctaggagagccatagcccagttttaacaatgcatcgcaggcatcaagataatcattaaacgtatttttcttcttcagaaattttccgtcttcgtaccattgttgccccagctcaccaccgccgcgaacatggacaatggcgtagacaaagccacgatctaacaaactcaagcggctaaaactgaaatcggcatcaatacttgcgccgtaagaaccatagccatacaccagcaacgggttgtgtcctttgcgaaaatgtttgcgatggtagaccaagctaaccggaacttcgacgccatcacgggcgactatccacaggtgttcactgcggtaattcgccgcataaaaaccaggaacttccgtttgttttaatacacgacgctcaccggtatccatatccagttcaaacaaagtgtctggtgtagtcatggaagaataaccataacgcaatcgcgcggtttcaggttctggattgtaggcaatccaggtcacataggccggatcatcaaaggcaataccaatgacttcccgggtcttgcggttaatttggcgcaaactggttaacccgcgctgacgctcttcaaccaccagccagtcggtaaacagcgtaaacccttccagcatgatgttttcgcgtggcggaattaactcttcccactgttgctcatcacgcatacgggtacggtataagccaaagtttttgccgtggcggttggaacgcagataaaaacgatgctggtagtgatcaaggctgtattcgtgatctttgcggcgcggcagaaaaacaaacggctcggcatcggccatttccgcgtccagcaggcgaacttcactggtggtggcgctggccaaatgaatgactacatagtgcttgctggtcgttttatgcaggctgacgtaataggtatcgtctttttcttcgtagatcagtttatcttggcttgctggcgtaccgatggcgtgacgccagacctgataaggcagcagcgtcaccggatgcttgcgaacatagtagaaaatccaggagtcatttgcccagacaaagctgggttcaacgttatccagcagttccgggtaccagttaccagtttccagattacgaaaacgaatgccgtactggcgtcgggaaagaaaatcttctgccagcgccataatggtgttatcgggcgtaatcgccattccgcccatgctataaaactcactatgagctgcgcgcttattggcatcgagcaatgtttcccactcatcccactcttcactgaatgcgctttgacgctggtagatagcatattcacagcctggttcataaatatgccgatagcggtagccatttttgatgtagggcgcagaaacttctcgttgcggaatgcggtcgatgatttcctttaagatgcgatcctgcaaggcttgttgactggccatcacccgatgaccgtaactattttcttgttgcaggtagtccaggacttctggctgagaacgcgtatcgtcccgcagccagtagtaattatcgatgcgcgtatcgccatgaagcgtcatggcgtggggaatgcgggcggcttttggtagcatgttattgttctttctggttgaaacatcttataagggtggcaaaactcaccggggatgcaagcgaaacaggggagtcattgcttagatgatgacaggtaatggcgcggatatcgaatgttatgcagacagagaaaatcagcctgttcaaatggctgtgcgattctggatagcccgaaatagtcaacttcaggctatccagagagcggaattattccgccaaagtgcgtttttgctgttcgagatcgcgttcaatgccgtcacgaacatcctgggggattttcagcgcgtcacccagtgcattcaggtaactgcgttccataaaatggtcaatatcaatagccgcgcaactcaggaaatagatttccagcgcctcttcttcattgcggaccccggtagccaggcgttgtggatccagcggttgttcgattgcctgctcaatgagtacacgcccctgctcttccacgccggctccacgcaattgctggtcgattgccgcacgttctttggcatcaatatgaccatcacttttagcggcaaagaccagcgcaaggatcaaacgtgctgtacgctcatccagcggcgtactttgcgcgccaaactgcggttcgtcctgatgcgccgcgcgaattttatctttgtatttattccacagcaccgtacccgctaccgctccgccgccaaccagtaacgcgttggtgccatatttcgtaagaagtttacgtgcacttttatttgcgaccagcagcccagccagtccgcctaatgcgcctggcactaacagtttgaccaatccctgatccgcagagctggaggtagaagaactgctttgcccaagcagggattgcagttgatttaaccagttagccatatttgctcctcaataaccatttttagtgcctgtagcatagcggatgaggatgtcagaaaatgtatatcgagacaaaagatgcgcaaataagcggggcggtaggccgttattcaaagaaattcgcgccaggtaaggtatttactgtatatcaggtgataagggtattttaggtgaaagtagtttgtcgttttgagtggcattgtttgatgctgattgcccgatgcgacgctgttgcgtcttctcaggcctacgattgtggtgcgttctggggcggacaaggcactcgcgccgcatccgccaacagtcaatcgaattatcagaagccattaacgccgctgatattccgccattcccgctttgcagtccacgctgacctggtaatgaatatcggcacttttaccacgcacggttagcggtacactccatttatcatctttaccctgaatgtcctgcaaactgacccaagccacgggatcggcctgaccgacaattttttgatcatctgcccaacgcgccacgcgattttgttgataatcacgttttacgctcgcggcaattccggcagcatccagatcttcacactttgggaaagtgacgctcttgctggtttcattattggcagcgaaaacacttgcgcaggcagaaaccaacaacagccctaaaaacgcccctctttttttcatgtttttctccatagcacaatgattcaggagaaagcatggtacaaattgtcaggagcgcaagttgcttcaggccgcgtgactggcatcttcctcttcggattcagcaccgacgacctgtggggacggtaatttgccggttttcagaatggtgctcagcacatctttttgttctgccagccataggctaagggcttcacgttgctcgtcttccatttgcactggagaatttgtcagccaggtgtcaagcagatccgccgtatcaagcattttgtcataagcatcggcttcctttttgctggtaaagctcattttctcttcgccctcacgaatgactacgtatttaacttcaaccgccatttgcagcctctcataataactgtgattttatacagtatatttcttttcggttgagaaatcaacatcagcaataaagacacacgcaaacgttttcgtttatactgcgcgcggaattaatcaggggatattcgttatgacgttattaggcactgcgctgcgtccggcagcaactcgcgtgatgttattaggctccggtgaactgggtaaagaagtggcaatcgagtgtcagcgtctcggcgtagaggtgattgccgtcgatcgctatgccgacgcaccagccatgcatgtcgcgcatcgctcccatgtcattaatatgcttgatggtgatgcattacgccgtgtggttgaactggaaaaaccacattatatcgtgccggagatcgaagctattgccaccgatatgctgatccaacttgaagaggaaggactgaatgttgtcccctgcgctcgcgcaacgaaattaacgatgaatcgcgagggtatccgtcgcctggcggcagaagagctgcagctgcccacttccacttatcgttttgccgatagcgaaagccttttccgcgaggcggttgctgacattggctatccctgcattgtaaaaccggtgatgagctcttccggcaaggggcagacgtttattcgttctgcagagcaacttgctcaggcatggaagtacgctcagcaaggcggtcgcgccggagcgggccgcgtaattgttgaaggcgtcgttaagtttgacttcgaaattaccctgctaaccgtcagcgcggtggatggcgtccatttctgtgcaccagtaggtcatcgccaggaagatggcgactaccgtgaatcctggcaaccacagcaaatgagcccgcttgcccttgaacgtgcgcaggagattgcccgtaaagtggtgctggcactgggcggttatgggttgtttggtgtcgagctatttgtctgtggtgatgaggtgattttcagtgaggtctcccctcgtccacatgataccgggatggtgacgttaatttctcaagatctcagtgagtttgccctgcatgtacgtgccttcctcggacttccggttggcgggatccgtcagtatggtcctgcagcttctgccgttattctgccacaactgaccagtcagaatgtcacgtttgataatgtgcagaatgccgtaggcgcagatttgcagattcgtttatttggtaagccggaaattgatggcagccgtcgtctgggggtggcactggctactgcagagagtgttgttgacgccattgaacgcgcgaagcacgccgccggacaggtaaaagtacagggttaaacccggcaaaaaaacgctacaaaaatgcccgatcctcgatcgggcattttgacttttacagcttagcgccttctacagcttcacgcgccagcttagtaatgcggtcgtaatcgcccgcttccagcgcatctgccggaaccagccaggaaccaccgatgcacagcacgcttttcagcgccaggtagtcacggtagttagccggagaaataccacccgtcgggcagaaacggacctgggagaacggacccgcgatcgcctgcagggctttcacgccgccgttagcttcagccgggaagaatttgaactctttcaaaccgtagtccatacccagcatcagttcggaaacagtgctgatccccggaatcagaggaatagtcccttcggtagcagctttcagcagcggctcggtcagacccgggctaattgcgaactgtgcacccgcttcagtgacttctgccagctgctgtggattcagcaccgtaccggcacccacaatcgcttcaggcacttctttggcgatagcacggatagcgtcaactgcacactcggtacgcagagtcacttccagaacgcgcaccccaccagcaaccaacgcttttgccatcggcaccgcgtgttccagtttttttaccacgataaccggtacaaccgggccggtggtcaggatactttctgcacttgttttccagtttttcatcagagttttctctcgcctgattacaaatttgtcgtcttaaaaagtgatacaggttgcgccctgttcggcaccggacagtttttcacgcaaggcgctgaataattcacgtcctgttcccacgcgactcgcgctcaggtcaggaatgtgcggttcgcgagcagccagttccgcttcgtctaccagcagcgtcagttcgcctgtctgtccattcacacgaatgatgtccccgtcgcgcacttttgccagcagcccgccatcgtaggcttctggtgttacgtggatagcactcggcactttaccactagcgccggagagtcgtccatcggtaactaacgcaattttgaaacaccggtccaataatacaccaagtggcggcatgagtttatgtaattctggcattccgttcgcttttggcccctgatgacggacaacaacgacacaatcgcggtccagcaaacccgcttcaaaggccggcataacgtcatgctggctttcaaaaacaaccgctggcgcttcaatcacctggttctcaaccggcacggcagaggttttcataaccgcacggcccaggttaccgcttaacacttttgtcccaccatgatgagagaaaggttgttcgaaggaagcgatcacattgctgtcgagacttttttccgccccttcccgccagtccagttcaccattattcagccatggttcaagggtataacgagacagaccaaaacctgccaccgtattgacatcttcatgcagcaggcctgctttgagcagttcacgcaccagaaccggtacgccacctgccgcctggaagtggttaatatcggccggaccgttcgggtagagacgtgccatcagcggtacaacatcagaaaggtcagagaagtcatcccagttaatctgaataccggccgcgcgcgccatcgccaccaggtgcatggtgtggttagtggaaccaccggtcgccagcagtgcaacgataccgttcaccaccactttctcatcgatcatcttaccgatcggcatccattcattaccattaccggtcatgcgtgtaacctgacgcgcagctgcggcggtcaaagcatcgcgcagcggagaatccggatgaacaaaagaagagcctggcaactgcatccccataaactccaccaccatctggttggtgttggcagtaccgtagaaagtacatgttcccggcgcatggtaagacgcggcttcactctccagtaaggccatgcggtccactttaccttcggcataaagctggcgaatacgcactttttctttatttggcaaaccgcttgccatcggtccagacggcacaaacaccgcaggcaaatgaccaaagctcagggctgccatcgtcagacccgggacaatcttgtcgcacacaccgaggaacagagcaccatcaaacatgttatgggacagccccaccgccgcagacatcgctatcacttcgcggcttagcaggctcaattccattccatcctgcccctgggtgacaccatcacacatcgccggaacaccgcccgcaacctgaccaaccgcattcgcttcatgcagggctttacgaatgatttctggatagtgttcataaggctggtgcgcggagagcatgtcgttataggaggtgatgatggcgatattgttacgcaacatgcttttcaaagaggctttgtcttctggctggcaggcagcgaaaccgtgtgccaggttaccgcatgccaactggctacgatgaacggtgctagttttcgcttgttctatccgggcgagataagcagagcgagtctcgcggctacgttcaatgattcgatttgttacgcgtaacaattgtggattcataaaggctcctgaaattgagttgtcagagcaggatgattcacaacgcgtttcattcagaggatttatgactgaaacgcctgtaaccggagctcatagggcaaaaacgtttcagtcagtgtaataaaaaaagcctcgtgggtgaatccgcacgaggcctgaaagtgtaaaaattgttctacaatctgcgcaagatcatgttaccggtaaaataaccataaaggataagcgcagatattactcaaactcattccaggaacgaccatcacgggtaatcatcgccacgctggcaacgggtccccaggttccggcctgatacggtttcggcgcatcattgtccatcgcccacgcctcagtaatggagtctacccatttccaggcttcttccacttcgtcgcgacgtacaaacagtgcctgaataccacgcatggtttccagcagcaaacgttcataggcatccgccagatgcgtctgattaaaggtttcactatagctcagatccagcttggtgatttgcaggttatgtttgtggtcaaggccaggaactttattcagtacctggatatccacgccttcatcaggttgcagacggatagtcagtttattctgcggcagatcctgccagctttctttaaacagattcagttcaggtgttttgaaatagaccacgacttcagaacatttggtcggcagacgtttaccagtacgcaggtagaatggcacaccggcccagcgccagttatcaatgtcgacgcggatcgccacgaaagtttctgtattgctgctcttgttcgcgccctcttcttccagatatcccggcacttttttgccctgggcgaagcccgcagtatattgcccgcgtacggttttttcgcgtacgttggagcggtcgatgcggcgcagagacttcagtactttcactttttcatcgcggatgctgtctgcgctcaggtcagacggcggagacatcgcaatcatgcaaagaatttgcagcaggtggttctggatcatgtcgcgcatctgaccggctttatcaaaatagccccagcgcccttcgatccccacttcttctgccacggtaatctcaacatgatcaatggtgcgattgtcccagttattcacaaacagggagttagcaaaacgcagcgccaacaggttcagcaccgtttctttaccaagatagtggtcgatacggtaaacctggcactcctcgaagtattcgccaacctgatcattgatttcctggctggtcgccaggctcgtccccagcggtttctccatgactacgcgtgccggtttagcattcagttttgcctcgccaagccctttgcaaattgcgccaaaagtgctgggcggcatggcaaagtagttaatggtgatacgatttttttgatccagcatcgcgccgagacggctgaatgcagcagtgtcattgacatcgagattacaaaaatccagacgtgcactcagggtgtcccataaaccttcatcaatggtttctttcatgaaagtttcgagcgcctcgcggacaactttggtatatgccgctttatcccagtcagcacgccctacgccgataatccgggtgtccgggttgagctgaccggctttttccagttgatacagggaaggcagcaatttacgacgcgcaaggtcgcctttcgcgccgaaaatgaccaggtcacaggcctgggctgtttgcgttaccgccatgtcattctccttaagttaactaacccggtacttaagccagggtatacttgtaattttcttacggtgcactgtactgcttttacgagcttgcgaaaactgtaaacgcttatccacccgtgcgattacgggaaaagcgcgcaaagtgcggcaaaactgataaaaaaatcatcgttttccattgggtaaaaatctgacactgatcatgttatgaaaaaaaataacaacttttttatctgcttttgtcattaacacggcacacaggcgtaatatctgacaaaactgcatttcgatttctttcagtgcggaaatcgtcattacccgtgagtctctttacatcatgaatatgctggaaaaaatccagtctcagctggaacatttgagcaaaagtgagcgcaaagttgccgaggtcattctggctagccccgataacgcgatccatagcagtattgctgctatggcactggaagccaatgttagcgaaccgacggtgaatcgtttctgtcgcagcatggacacgcgcggttttcctgattttaaacttcatctggcacagagtctggcgaatggcactccctatgttaatcgcaatgtcaatgaagatgacagcgttgaaagttacacagggaaaatatttgagtccgcaatggcaacgcttgatcatgtccgtcatagtctggataaatctgccatcaaccgcgccgtcgacttgctcactcaggcaaaaaaaatcgcctttttcggattaggctctagtgccgccgttgcccacgatgcgatgaataagttctttcgttttaatgttccggtggtgtactccgatgatatcgtgctgcaacgcatgagttgtatgaattgtagcgacggagacgtggtggtgctgatttctcacactggaagaacaaaaaatctggtcgagctggcgcagctggcacgcgaaaacgacgccatggtgattgccctcacctctgcgggtaccccgctcgcccgggaagcaacgctggcaattaccctcgacgtaccggaagatactgacatttatatgcccatggtttctcgacttgcacagctgaccgtgatagatgtgctggcgacaggatttactttgcgacgcggtgcaaaattcagagataacttgaagcgggtcaaagaagcgctgaaggaaagccgttttgataagcagttacttaatttaagtgacgatcgctaaaaacgactgtcactgtcctaatcttatacgacatccgaatgagattaatttatcgccatcgcggcgttatttcattcggatttcatgttcaagcaacacctggttgtttcagtcaacggagtattacatgtccagaaggcttcgcagaacaaaaatcgttaccacgttaggcccagcaacagatcgcgataataatcttgaaaaagttatcgcggcgggtgccaacgttgtacgtatgaacttttctcacggcagccctgaagatcacaaaatgcgcgcggataaagttcgtgagattgccgcaaaactggggcgtcatgtggctattctgggtgacctccaggggcccaaaatccgtgtatccacctttaaagaaggcaaagttttcctcaatattggggataaattcctgctcgacgccaacctgggtaaaggtgaaggcgacaaagaaaaagtcggtatcgactacaaaggcctgcctgctgacgtcgtgcctggtgacatcctgctgctggacgatggtcgcgtccagttaaaagtactggaagttcagggcatgaaagtgttcaccgaagtcaccgtcggtggtcccctctccaacaataaaggtatcaacaaacttggcggcggtttgagcgctgaagcgctgaccgaaaaagacaaagcagacattaagactgcggcgttgattggcgtagattacctggctgtctccttcccacgctgtggcgaagatctgaactatgcccgtcgcctggcacgcgatgcaggatgtgatgcgaaaattgttgccaaggttgaacgtgcggaagccgtttgcagccaggatgcaatggatgacatcatcctcgcctctgacgtggtaatggttgcacgtggcgacctcggtgtggaaattggcgacccggaactggtcggcattcagaaagcgttgatccgtcgtgcgcgtcagctaaaccgagcggtaatcacggcgacccagatgatggagagtatgattactaacccgatgccgacgcgtgcagaagtcatggacgtagcaaacgccgttctggatggtactgacgctgtgatgctgtctgcagaaactgccgctgggcagtatccgagtgaaaccgttgcagccatggcgcgcgtttgcctgggtgcggaaaaaatcccgagcatcaacgtttctaaacaccgtctggacgttcagttcgacaatgtggaagaagctattgccatgagtgcaatgtacgcagctaaccacctgaaaggcgttacggcgatcatcaccatgaccgaaagcggtcgtaccgcgctgatgacctcccgtatcagctctggtctgccaattttcgccatgagccgccatgaacgtacgctgaacctgactgctctctatcgtggcgttacgccggtgcactttgatagcgctaatgacggcgtagcagctgccagcgaagcggttaatctgctgcgcgataaaggttacttgatgtctggtgacctggtgattgtcacccagggcgacgtgatgagtaccgtgggttctactaataccacgcgtattttaacggtagagtaagtacgttgccggatgcggcgaaaacgccacatccggcctacagttcaatgatagttcaacagatttcgaatattctgaagcaaacttgaacttatcatcaggcgaaggcctctcctcgcgagaggcttttttatttgatgggataaagatctttgcgcttatacggctggatttcgcccggtttgcgagttttcagcaattttagtatccaggtgtattgttctggtcgcggaccaacaaaaatctcgacttcttcattcatccgccgcgcaatcgtatgatcatccgcctctaacagatcatccatcggtgggcgcacctgaatcgtcagacgatgcgtcttgccatcataaatcggaaacagcggtacaacgcgcgcacggcacactttcatcaaacgaccaatcgcgggcaacgtcgctttataggtggcaaagaaatccacaaattcgctgtgctctgggccatgatcctgatcgggtaaataatatccccagtacccctgacgtacgctctggatgaatggtttaataccgtcatttctcgcatgcagacgaccgccaaagcgacgacgcaccgtgttccagacataatcaaaaaccgggttgccctgattatggaacatcgctgccattttctgcccttggctggccatcagcatggcaggaatatcgacggcccaaccgtgcggcaccagaaagataactttctcgttattacgccgcatctcttcgatgatctccagcccttgccagtcaacgcgcggctgaattttctccggcccgcgtattgccaactcagccatcattgccatcgcttgcggcgcggtggcaaacatctcatcaacaatcgcttcgcgttcagcttcactacgttctggaaagcagaggctcagattgattaacgcacgacggcgactgctttttcccagtcgtccggcaaaacgtcccagccgtgccagaatgggatcacggaactttggcggcgttaaagcgatacccgccatcgctgctacgcccagccatgctccccagtagcgcgggtggcgaaaggatttatcaaactcaggaatgtattcgctattattttttttcgtttccatgcttttccagtttcggataaggcaaaaatcaatctggtgatagtgtagcggcgcaacttgccccgcaccaaataaaaaaagccggtactgactgcgtaccggctgcgaatggatgttaattaatcaaaccgtagctgcggcacaatctctttggcctgcgccaggaattcgcgacgatcggagccggtcagcccttcggtacgcggcagttttgccgtcagcgggtttacggcctgctggtttatccatacttcatagtgcagatgcggcccggtactacgtccggtattaccggaaagcgcgatacggtcgccacgtttcaccttctgtcccggtttcaccagaatcttgcgcaagtgcatataacgcgtggtgtagctgcgaccatgacgaatagccacataataacctgctgcgccactgcgtttggcaaccaccacttcaccgtcacccacactaagcactggcgtaccctgcggcatggcgaaatcaacacctctgtgtggtgcaacgcgaccggtcaccggattagtacgacgcgggttaaaattagagctgatacggaactgtttcgccgtcgggaatcgcaagaatcctttcgccagaccagtaccgttacgatcgtagaatttgccatcttcagcgcggatagcgtaataatctttaccttcactacgcaaacgtacgcccagcagctggctttgctcacgtttaccatcaagcatttctcgagacattaacaccgcaaattcatcgccttttttcagtttgcggaaatccatttgccactgcatggctttaatcactgcgctcacttcggcgctggttaaaccggcgtttctggcgctggcaacaaagcttcccccgacggtacctttcagcagattgttaacccactctccttgctgcatttcgctggtcattttaaaaccgttagcggcagtacggtcataggttcgggtttcacgacgagacacttcccaggtgaggcgctgcagttcgccgtccgcggttaatgtccaggagagttgttgaccgattttcaggttacgcaattctttgtcggccgcagccagttgggtgatatcacccatatcaataccatactgattgagaatgctgcttagcgtatcgccagtggaaacaacatattcatgcacgcccgcttcaccggcgattttgtcatccagttcgtcctggggaatggcttcatcttcttgtgcagcttgatcaatcggctcactggcttcaggtaagaggctacgaatttcgttctgttccagctcaatggttttgacaattggcgtggcatcacggtgataaacataaggccgccagacagcgacggccagagtaagaacggtgaggctccccaacataacgcggtgtggtcgcggtaaattattaaacgccagggcgacagagcgggctatctgttgcacgtaatcacttcctcattaatctcctttcaggcagctcgcatactggttggctaattgactcaggaattcactatagcttgttttacccagtttgatattcgtccccaggggatccaacgttcccatacgaacggatgtccctcgtgcgacgctctcaacgaccgctggcctgaactgtggctcagcaaaaacgcaggttgctttttgctcaaccaactgtgttcttatttcatgtaaacgctgcgcgccaggttgaatctcagggttaacggtaaaatgaccaagcggtgtcagtccaaactgtttttcgaaatagccgtaagcatcgtgaaaaacgaaataacctttccccttgagcggcgcgagctcgttaccaacctgcgtttcggtactggctaattgtgcctcaaaatccttcaggttggcgtcaagtttggctcgactttgcggcataagttccactaattttccatggattgcaaccgctgtagcccgcgctatctctggggaaagccaaagatgcatgttgaaatcgccgtgatggtgatcttcgtcacttttttccgcgtggtcgtgatcatcatcatcgccgtgaatacttttcatcagtagcggtttcacatcttcaagctgcgcaatcgttacctgcttcgctcctggtaatttgcttaccggtttttgcataaacgcttccatctccgggccaacccaaacgactaagtccgcgttctgtaagcgttttacatcgcttgggcgcagactataatcatgttcactagcgccgtcaggaagtaaaacctctgtttctgttaccccatcagcaatggcagaagcgatgaacccaacgggtttaaggctagcgacaacggcggcatctgcggcctgtgttgcacctccccagagagcggcggataatgctgcgaaaagaagcgtttttttatgtaacataatgcgaccaataatcgtaatgaatatgagaagtgtgatattataacatttcatgactactgcaagactaaaattaacatgacaagtctggtttccctggaaaatgtcagcgtttcttttggccaacgccgcgtcctctctgatgtgagcctggaacttaaacctggaaaaattttgactttacttgggccaaatggcgcaggtaagagcacactggtacgggtagtgctcgggctggtaacacccgatgaaggggttatcaagcgcaacggaaaactgcgcatcggctatgtaccgcagaagctgtatctcgacaccacgttgccactgaccgtaaaccgttttttacgcttacgccctggtacacataaagaagatattttgcctgcactgaaacgtgtccaggccgggcacctgattaacgcaccgatgcaaaagctctctggtggcgaaacgcagcgtgtactattagcgcgagcattgttaaatcgcccgcaattattagtgctggatgaacccactcaaggcgtggatgtaaatggccaggtggcgttatatgaccttattgaccaactgcgtcgtgaactggattgtggcgttttaatggtttctcacgatctgcatctggtgatggcaaaaaccgatgaagtgctgtgcctgaatcaccacatttgttgttccggcacaccggaagttgtttccctgcatccggagtttattagtatgtttggtcctcgtggtgctgaacaactgggtatctatcgccatcatcataaccatcgtcacgatttacagggacgaattgttttgcgtcggggaaatgatcgcagttgatttaacgtcggggaaatgatcgctcatgattgaattattatttcccggttggttagccgggatcatgctcgcctgtgccgcgggtccgctgggtagctttgtagtctggcgtcgtatgtcttatttcggtgatacgctggctcatgccagtttacttggcgtcgcgtttggtttgttgctggacgtgaatccattctatgcggtgattgccgttacgctgctgctggcgggcggtctggtatggctggagaagcgtccacagctggcgatcgacacgttattagggattatggcgcacagtgccctgagcctgggcctggtggtcgtgagtctgatgtctaatattcgtgttgatttgatggcttacctgttcggtgatttgctggcagtgacgccagaagatctcatctctattgcgattggcgtggtcatcgtggtggctattttgttctggcaatggcgcaatttgctgagtatgacgataagcccggatctggcgtttgttgatggtgtgaaattacagcgagtgaaattgttgttgatgctggtgacggcattgacgattggtgtagcgatgaaatttgtcggtgcgttgattattactagcttgctgattattcctgctgctactgcgcgtcgctttgcccgcacgccggaacagatggctggtgtcgctgttttggtggggatggtggcagtgactggcggtttaaccttttccgcggtttacgatacgccggcgggtccgagcgtggtgctatgtgcggcactgttatttattctcagtatgatgaaaaagcaggccagctaatctatcgctgaacacatttgtcggatgcggcgcgagcgccttatccgacctacggttcggtatctctggtagtcctggtaagacgcgaacagcgtcgcatcaggcatattgccagtgccggatgcggcgcgagcgaccaatccgacttacggcatttctggcggcgttatgccaaagtgattccacgcccgcgtcgtcgccatacgcccacgcggtgtacgctgcaaaaagccttgctgaatcaaataaggttccagcacatcctcaatggtttcacgttcttcgccaatggctgccgccaggttatccagacctacaggtccaccaaagaacttatcgattaccgccagcaacaatttgcggtccatataatcgaaaccttcagcatcgacattcaacatatccagcgcctgagcagcgatatctgcgctgatggtgccatcgtgcttcacttcggcgaaatcacgcactcgacgcagcagacggttggcaatgcgcggcgtaccgcgagcgcgacgagcaacttccagcgcgccgtcatcactcatctcaagccccataaagcgtgcgctgcgactgacgatatattgcagatccggcacctgataaaactccagacgttgcacaataccaaaacggtcgcgcaacggacttgtcaggctacctgcgcgcgtggttgcaccaatcagggtaaacggcggcaaatcaattttaatggagcgtgccgccggaccttcaccaatcatgatatccagttggtagtcttccattgccgggtacagcacttcttcaacaactgggcttagacggtggatctcatcaataaacagcacgtcatgcggttcaaggttagtgagcatcgcagccaaatcgcccgccttttccagcaccggaccagaagtcgtgcgtaaattaacgcccatttcattggcgacaatgttggcaagcgtagttttacccaaccccggaggaccaaaaatcaacaaatgatcgagggcatcgccgcgcagtttcgctgctttgatgaaaatctccatctgactacgaacctgcggctgaccaacatactcttccagtaatttggggcgaatggcgcgatctgctacatcttccggcaaagtggtaccggcagaaatcagacggtctgcttcaatcatcctttacctcataacgcggcgcgtagggcttcgcgaattaaagtttcactgctggcgtcagggcgagcgattttgctcaccatgcggcttgcttcttgtggtttatagcccagcgccaccagcgcggcaaccgcttcttgttcagcatcgtcggtcgccgggctggcaggagacgtgagtaccaggtcggcggctggcgtaaagagatcgccatgcaaacctttaaatcggtctttcatttcaacaatcaagcgttcggcggtttttttgccaatacccggcagtttcaccagtgcccccacttcttcacgctcaacggcattaacgaactgctgcgcactcattccggagaggatcgccagcgccaacttcgggccgacgccgttggttttgatcaactctttgaacaatgtgcgctcttgtttattgttaaaaccgtacagcagttgcgcgtcttcacgcaccacaaagtgggtgaaaacgatcgcttcctgacccgcttcagggagttcataaaaacaggtcatcggcatatgcacttcatagcctacgccgcccacttcaattaacaccagcgggggttgtttttcaatgatgatgcctctgagtctgcctatcacatgacgctcctgcgtaatgaatcaaagataatgctgtatgataaaaaaatgctggatagatatccagcgaaggatgaagaaaacttgcgaggtgtctcgatgaactgaaaaatggcacagtataatttattctacaggttatattggaagcaaatattttaatattacatattcagtgaagaaatgcgtaataaaaatatacattgcgcctcctgaaaaaataaattttttatgctattacgtatatttgtatctatttcaatggaatgacaacgtgaatattaattaccctgctgaatatgaaattggagatatcgtctttacatgtataggtgctgccttatttggtcaaataagtgctgcaagtaattgctggagtaatcacgtcgggatcattatcggtcataacggtgaagacttcctggttgcagaaagccgggttccccttagtaccatcaccacgctatctcgttttattaaacgtagctctaatcaacgctatgctataaagcgattagacgctgggctgacagaacgacaaaaacaacgaattgttgaacaggttccctcccggctacgcaaactttaccacaccggttttaaatacgaatctagccgccagttctgtagtaaatttgtttttgatatttataaagaagcgctatgtattccggtgggtgaaatagagacgtttggagaattgttaaatagcaatccgaatgcaaaactcactttctggaaattctggttcctgggttctattccgtgggagcgtaaaaccgtcacgccagccagtttgtggcatcatccgggtttggtgttgattcatgcggagggagtggaaacgcctcagccggaactgaccgaggcggtataacttaacgcagtcgccctctcgccaggttcagccggctttcgctcatctgcatcgcattctgactaacgtggcagtgggtgatagcaatcgccagcgcatcggcggcatccgcctgtggattagcgggcagtttcagcaaggtgcggaccatatgctgcacctggcttttttcggcactgccaatacctaccaccgtttgctttacctgacgtgccgcgtattcaaatactggcaactcctgattcaccgccgccacaatcgccacgccgcgcgcctggcccagtttcagggcactgtcagcgttctttgccataaagacttgttcaatggcgaaataatcaggctggaactgggtgatgatttccgtcacgcccgcatagatgagtttcagacgagacggtaaatcatccactttggtgcggatgcatccgctacccaggtaggacagttgcctacctacctggcggatgacgccgtagccggtcacgcggctacccggatcaatgccgagaataatagccatcacgcgtctccgttttgctgtttagcaggcctcatcagagagtcgctgcgacctcatcagagatttcaccgttatggtaaacttcctgcacgtcgtcgcaatcttccagcatatcgatcagacgcatcagtttcggtgcggtttctgcatccatatcagctttggtagacgggatcatggaaacttccgcgctgtctgctttcagacctgccgcttccagagcgtcgcgcactttacccatttcttcccatgcagtgtagacatcaatcgcgccgtcatcataggtcacaacgtcttcagcacctgcttccagtgctgcttccatgatggtgtcttcatcgcctttctcgaaggagatcacgccttttttgctgaacagataggcaacggaaccatcagtaccgaggttaccgccacatttgctaaatgcatgacgcacttcagcaacggtacggttgcggttgtcagacagacattcaatcatgattgccgtgccgccaggaccgtaaccttcgtagatgatggtttccatgtttgcatcatcatcaccgcccacaccacgtgcaattgcgcggttcagtgtgtcacgggtcatgttgttagacagtgctttatccaccgccgcacgcagacgcgggttagcgtccggatcgccaccgcccagcttagccgcggttaccagctcacgaatgattttagtgaagattttaccgcgcttagcatcctgcgcagctttacgatgtctggtgttggcccatttactatgacctgccataaaaatatctccagatagccctgcctgttcaggcagcgttaattacaaactgttcaatcgcctgccggttgctccaggacttagtgagcgccgccgcagcaggcgcatcaagccacttgtaagccagatgttcagtgaaaacgatctgccgctcgtgcggaagcgcaagacagaaccaactttccgtattacgcgtcacgcccggcgcatagcgatgacgtaaatgactaaaaatttcaaactctaccgtgcgctgacagtcaattaaggtcagttgttcagcgacaacatcaatggtgacctcttcctttacttcgcgcatggcagcttgcggcgcggtttcaccctcttccacgctgccggttacgctctgccagaaatcgggatcgtcacgccgctgcaacatcagcacccgtttcgtatcttgtgcgtagatgaccactaagatgctaacgggacgcttatacactttatccttcacgctgcctcttcgttgactgccttcgctcatcccattcacatagttatctatgctcatgggagttcactcagttgccgcctcgatgcaacgcgaatgatttcgtgtatttgagtcatatcagttattctcagccttcttcacaacctgaatgctcagctcagccagtgcagtcgggttagcaaagctcggtgcttcagtcatcagacacgctgccgccgtggttttcgggaaggcgataacgtcacggatattgtcggtgccggtcagcagcatggtcagacggtcaagaccgaatgccagacctgcgtgcggcggagtaccgtatttcagagcgtcgagcaggaagccgaatttctcgcgctgttcctcttcgttgatacccagaataccaaacaccgtctgctgcatatcaccattatggatacgtacactaccaccgcccacttcgtaaccattgatgaccatatcgtaagcgttcgccaccgcattttccggtgcagctttcagttctgcagccgtcatatctttcggactggtgaacggatggtgcattgccgtcaggccgccttcaccgtcgtcttcaaacatcgggaagtcgataacccacagcggtgcccatttgctttcgtcggtcagaccaaggtctttacccactttcaggcgcagtgcacccatcgcgtcggcaacaattttcttgttgtcggcaccgaagaaaatcatatcgccatcttgcgcggcagtacgatccaggatgtcttcgatgatttctgcattaaggaacttcgctaccgggctgttgataccttccagacctttcgcgcgttcgttaactttgatgtaagccagacctttcgcgccgtagattttaacgaagttaccgtattcgtcgatctgcttacgggtcaggcttgcgccgcccggaacgcgcagagccgctacgcgacctttcggatcgttcgccggacctgcaaatacagcaaactcaacagatttcagcagatcagcaacgtcagtcagttccatcgggttacgcagatccggtttatcagaaccataacggcgttctgcttccgcaaaggtcattaccgggaaatcgcccagatccacacccttcacttccagccacagatgacgcaccagcgcttccatcacttcacgcacttgcggcgcggtcatgaaagaagtttccacatcgatctgagtaaattcaggctgacggtcagcacgcaggtcttcgtcacggaagcatttaacgatctgatagtaacggtcaaaaccggacatcatcagcagctgtttgaacaactgcggggattgcggcagtgcgtagaatttacctttgtgcacacgagaaggcaccaggtagtcacgcgcgccttccggcgtggctttggtcagcatcggagtttcgatgtcgaggaagccgtggtcatccataaaacggcgcaccaggctggtgattttagcgcgggttttcaggcgctgagccatttccggacgacgcaggtcgaggtagcggtatttcagacgcgcttcttcggtgttgacgtggttagagtcaagcggcagaacatctgcgcggttgatgatagtcaggctggacgccagcacttcgatttcgccggtcgccatatcgcggttaatatttttttcgtcacgcgcacgtacggtgcccgtgacctgaatgcagaactcattacgcagttcagaggccagctttaacgcgtccgcacgatccggatcgaaaaatacctgcacgataccttcgcggtcgcgcatatcgatgaagatcaggctaccaagatcacgacgacggttgacccaaccacacagagtcacctgctgccccacgtgggacaaacggagctgtccacaatattctgtacgcatgagatatcccttaacttagctgccggcggatgccccctgctgcgcaggtgaccaagtcgcagcgttagctgtatgtcacaactgaatgaaaaaaggcggctattatactggaaattctgccgcaccgtaagagcctggcccgcgctggaacgcctcgttaccactttatatcgggcctgaaatcagactctacgccagtttgctataaaggtgttgcccgaactcataaaaattaacaaaatttgtcgttccgccatcggctaatcgcattaaggtgtgaggcacgattttgttttttcaggagtcattatgcttgaacttaatgctaaaaccactgcgctggtggtgatcgatttacaagaaggcatcttaccttttgccggtggtccacatactgccgatgaggtagttaatcgcgccgggaagctggcggcgaaatttcgcgccagcggtcagcccgtgtttctggtgcgcgttggctggtctgccgattacgctgaagcattaaaacagccggtcgatgcgcccagtccggctaaagtgttgcccgaaaattggtggcaacatcctgctgcattaggtgcaaccgacagcgatatcgaaatcatcaaacgtcaatggggtgcgttttacggtacggatctggagttgcaattacgccgccgaggtatcgatacaatagtgttatgtgggatcagcaccaatatcggtgttgaatccaccgcccgcaatgcctgggaacttggctttaatctggtgattgccgaagacgcctgtagtgccgccagcgccgagcagcacaataacagtatcaaccatatctacccgcgcatcgcccgtgtgcgtagcgtggaagagatcctcaacgcgttatgatttacatcggtctaccgcaatggagccatcctaaatgggtgcggttggggatcaccagccttgaagagtatgcccgccactttaactgcgtggagggcaacaccacgctttacgccctgccgaaacccgaggttgtcctgcgctggcgtgagcagaccacagatgacttccgcttctgttttaagtttccggcgaccattagccatcaggcagcattacggcattgcgatgatttagtgactgaatttttgacccgcatgagtccgttggctccgcgcattgggcaatactggctgcaactgcctgccacattcggcccacgggagctgcctgcgctttggcattttctcgattctcttcctggcgaatttaattatggcgtggaagtccgccatccacagtttttcgccaaaggagaagaggaacaaacgcttaatcgcggtttacatcagcgcggcgttaatcgggtgattttagacagccgcccggttcatgcagcacgtccacacagtgaagctattcgcgacgctcaacgaaaaaaacctaaagttccggtacatgctgtactgacggcgacaaatccgctgatccgttttatcggtagtgatgatatgacgcaaaaccgggaattatttcaggtctggttacaaaaattagcgcagtggcatcagaccactacgccttatctttttttacatacgccagacattgcccaggcaccggaactggtacataccctgtgggaagacttacgtaaaacgcttccagagatcggagcagttccggctattccacagcaatcttctcttttctgaatttgccacctatcatagacaggtgccatcggccattttaaagggagtttgtatggtaagcgcgctgtacgccgttttaagtgcgttgttattaatgaagttctcttttgatgtcgttcgcctgcgaatgcagtaccgcgttgcctatggcgacggcggttttagcgaactgcaaagcgctattcgcattcatggtaacgcggtggaatatattcccatcgcgattgtgctgatgctgtttatggaaatgaatggcgcagaaacctggatggtgcatatttgcggcatcgttttgcttgctggtcgtctgatgcattattacggttttcatcaccgtctgttccgctggcgacgttccggcatgagcgccacctggtgtgcgctgttgctgatggtgctggcgaatctttggtatatgccctgggagttggttttctccctgcgttaacgcacaatacgccactttctttttcccggatttttacgttatgtctcaccgcgacacgctattttctgcccctatcgccagactgggcgactggacctttgatgaacgggtagctgaagtcttcccggatatgatccagcgttccgtacccggctattccaatattatttccatgattggtatgttagccgagcgcttcgttcaacctggtacgcaggtttacgatctgggttgttctctgggcgcggcgacgctcagcgtgcgtcgcaacattcatcatgataattgcaaaattattgccatcgacaactccccggcgatgattgaacgctgccgtcgtcatattgacgcctataaagcccctacgccagtagacgtcattgaaggtgatattcgcgatatcgccattgaaaacgcaagcatggtggtgctgaattttaccctgcaattcctggaaccttccgagcgccaggcgttactggataaaatttatcaagggctgaaccccggcggcgcgctggtgcttagcgaaaaattcagtttcgaagatgccaaagttggtgaactgttgttcaacatgcaccacgactttaaacgtgccaacggttacagcgaactggagatcagccagaagcgcagcatgctggaaaacgtgatgctgaccgattccgtggaaacccataaagcacgcctgcataacgccggttttgagcatagtgagctgtggttccagtgctttaactttggtagtctggtggcattaaaagcagaggacgctgcatgatcgactttggtaacttttattctctgattgccaaaaatcatcttagtcactggctcgaaacgctgcccgcgcagattgctaactggcagcgcgagcagcagcacgggttgtttaagcagtggagtaatgcggtggagtttctacctgaaattaaaccgtatcgtcttgatttattgcatagcgttacggcagaaagcgaagagccactgagcgcagggcaaattaaacgcattgaaacgctgatgcgcaacctgatgccgtggcgcaaagggccgttcagtctgtatggcgtcaacatcgataccgaatggcgttccgactggaaatgggatcgtgttctgccccatctttctgatttaaccggacgcaccattctggatgtcggctgcggcagcggttatcacatgtggcgcatgattggcgcaggcgcgcacctcgcggtggggatcgaccctacgcaactgtttctgtgccagtttgaagcggtgcgtaaactactgggtaatgatcagcgcgcgcatttgttaccgttaggtattgaacaacttccggcactgaaagcctttgataccgtctttagcatgggcgtgctttaccatcgccgtagtccgctggagcatctatggcagttgaaagatcaactggtcaatgaaggtgaactggtgctggaaacgctggttattgatggtgatgagaacacggtgctggtaccaggcgatcgttacgcgcaaatgcgtaatgtctatttcatcccttccgcgctggcgctgaaaaactggctgaagaagtgtggttttgtagatatccgcattgcggatgtgagcgttaccaccacagaagagcagcgacgcaccgaatggatggttaccgaaagcctggccgatttcctcgacccacatgatccgggtaaaacggtggaaggttatccggcacctaaacgcgcggtgctgattgcgcgcaagccgtaaaggtctggtattactgccggatgcggcgtgaacgccttatccggcctacaaaaccttgctaattcaatatattgcagggactatgtaggcctgataagcatagcgcatcaggcagctttacgtttgcataacctcagcgcccgtttccgggcgctattcacgtcttacgcctgaacagctggctgatcaaacgccgttaacttcggtgcattgcccgtatatttttcgatatacaccaacgcactgttaccggcacaggcatttgccagctggctgctggggatatccgccgttaacacgttcgcactgccgtttttacacaagccattttccagatctggccatgcaccttcatgcacgcataccacgccttttttgatcccgtcagtcaccaccgcgcctgtcaaaatctgaccacgtttgttccagacacgcaccagatcgccattcgcaataccaaagcgtgcagcatcttcggtgtgaatagtgattggttcacgatcggcgatcgcatattttttacgcagttccgcatagttaagctgactgtgtaaacggtgtgccggatgtgcggtcagaagctgtaactgcttctcgtcggcggtacctttccattcatcaggagccagccaggttgggtgtgccgggcaatccttatagccaaatttttccaacgttttactatagatttcaattttgccgcttggcgtacccagcgcatttttcaccggatcggcgcggaaatcaccataacgaacgtactgttcgttcttctcgctgtggcgcatttcgatcagtttattttgctgccagaaggcattaaacattggcatagtgacgcgttgcgcacgggcacctttctgagcggcatcatagaaaaatttcagccacgccatttcatctttaccttcggtatagatctcttttccgccaggtttgagtaattccgcaagatcggcaaacacgtcaaaatcgttacgcgcttcaaattgcggagcaacagcctgcttcatcggcacaatatgctggttgctgtaatcaccggtcatcgtcaagtcattgcgctcaaagcttgtggtgatcggtaatacgatatctgcgtgtttggctgctgcggtccagtagcattcagaaacgacgatcatctccggtttctgccatgctttaatcagacgattagtatcctggtgatgggtaaagttaccgccacccgcccaccagatcattttgatattcggatacgtttgttctttaccgttatgctgatatttgccgccaggattttccagcgcatcgacgatacgggcaacaggaatcgccgtcattccgccatcatcagcggcctcgctggcatgtccggcaatcgccgcagacatttccggcagcacgccgccaacacgcgtcgggttgccaccgttggagtaatgataagagaaaccaaaaccgccgcccggtgtaccaatctgccctaacatcgccgccagcgtcaccagcatccagtgtttctgttcaccatattgctggcgctgaattccccagcctgccatcagcattgtgcgattcgccgccatcagttcagcgagtttgactatctgcgcttccggtacgccagtaatttccgccgcccagaccgcgctcttcggcgtattatcgctcttacctgtcagatactcttcaaactgcggatacccggtagtgtatttttcaaggaacactttatcgtgtttgccttgtgtcatcagggtatgcgcaatccctaacatcagtgccacgtcggtgcccatattcggcgcgatccaggtggcattatcgtcaaagaattcgatggtttcggagcggataggatcaatggcaatcactggtttgccagattttttcagctgatggaagtattccagcccttgctcatcggtactgctccaggcaatttttaaggtattcagcgggttcattccccacagcaccacaacctggctgttttccagaatcagcggccaggaggtctgctgttcatacacctctacagaaccgaccacatgcggcatgatcacctgtgctgccccggtactataatcgccgctatgcccggaataaccgcccgccaggttcatataacgttgcagtaaggtttgcgctttatgcaacacgccagaagagcgccagccgtaagatccggcaaaaatggcgcttggtccgttagctttacgaatacgatcatgttgctcatgaatcagttttaatgcctgttcccagctcacctgtacataggtatcttcgccacgacctttcgccggttgcagtggattatcgagatagctttttctcaccatcggatgctgaatacgcgccgtggtgtgtacctgatccgccgccgtagactgtaaggaattcggtatggttttcgccagcgcgcctgtactagaaacaatcttgccgtccttcacttctacgttcatcgctccccaacgtcccgcggtgaggattttaccgcccttctcttctgcccatgcggggagcggtgctgcgcttgtcaccaccagcgctccagcggcaataccgctgtgtttaataaattcacgtcttgttaatgtcataacttcctccctgatcaacgaggatcactgtttctcggtaatatctttggcgttgtactggaaataccgcgttaaaatgtccagttcgttttcgctcatgctggttcgtgcccccattcctttggcaatggacggccacgcattgacggtgtaatggtcggcggcaataggggcatgacaaccagcgcaataggtatcgtcaagtttttcagcgtattgccatagcggtttacggtccgctaatgcgggatcggtaagcgcaccctgtaaagacgcctgacgccattgattgccgtattcgtcagcctgccattccccgtttacagtgagcgccttgataccttcttcacttaatgtggctagcgccagccgttgacctgccgccaggtagagcgtgttttcactgccctgcatttgataaccctgcaacagaacgatcggctgtttgccactggcatcaacgacggtgagatcggttccaggattcacggtagccagctcgcctatgtgagaagttttgaaaggataaatatgtgcgccattagtaacactagtagcggcctgactttccagctcatgcgccgcgttgtcatccatttttatttctggcggaaaatgggcaatgcctttatgacaatcgatacaggtttcgctgtccttttgtgctttgttatgcattttctgcgcagattcactttggctggcaatatccatggcatcaaaagaatggcaactacggcacgttgcagagtcagtggcttttaattctttccatactgtttcggccatttcctggcgatgagcttcgaacttatcgtcactgtctattttgccgctaacaaattcatgataaatatctttagatgcctttaatttagcaaataaataatccatcccactctttggaatatggcaatcggcacattccgcacgtatccctttctggttgctaaagtggacagttccctgatattcctcaaaaggtttactcatgctgtggcaggaaaggcaaaatgctgtatcgctcgttttatgtaagactttttgcgccagcaataacccgccgccaccaaccacaaccgctatcagcaaaaacaataacccaatgcgttttttccctcgcatagattcctctaattaaattactggacaccgaaatcattgtataattaaatatacaacgaattaaccgcttgcataattaggcacaacactgcctgaaacaatcgataaagaatatgatttattacaatgtaatcattaattgctaaggaataacccagttgctatttagaatatatatttatcagttttagtaatttaaatcccataattaatgtgaatatatacaatatttttagcacaacgctatgcgcactgtcacccgctcaacagatcacggttatcgttcgttttttatactgttcagggataaaaaaaggcccctgttgaaattgcaggggcctggtacgagcaagcatcatattgggcgacatgatgcaacggtaaaaatcatttggcctgatggcgttcaatgattcctttcatttcagcaaccgccgccccgtctacgatataacggctatactcgtccgcgtgttcatcactactcatggacaatccttgattacgataacgcatcggactggcttgccacgctcccgcggagctatggacttccagcactccggcatcgaggaagtggtgcaggttttctgcacggactcctgctccggccataatgattggagcatcacgatgggcaataagttccataattttacttaaaccttgcagtgcgtcacttttttgcccacttgtcagtacccgggcaatgcccaattccgcaagattattgagtgtatataaagggttagcgcacatatcgaaggcgcgatgaaaagtcactgccagcggaccggcagcagccattattttttccattcgtggcatatcgacattcccgtcaacatcgagaacgcccgtcaccagtccaggaaaacctaattcgcggaccgtgcgcacatcctcaagaatggcggcaaactcaccgtcgctgtagcaaaaatcaccaccgcgtgggcgaattatcggatgcacagggatcgtcacccgctggcgcacggatttcagtacacccaagctcggcgttaagcccccctcttttggggctgcgcataattcaactctgtctgcgccgttttgctgcgccgttagtgcacattccatgctgtaacagcaaatttccagtaatgccatttttactccttaattacgcgctctgctcgctggcaacgatctcttcaatggaccacggatgaaacttaatagttgttttgccatcggtgaccgccagcgtcggattcggtaatcgctcatgctcaccttttgggctactggttttcacactgatccccggtaggctgagtccttcatcagaaagcaatgccagcgcacgggcattcagcgtttctggatcacccggcagaacgatttcaatatgttcccaaccttcgtgtgggtaacgtttttccccgggccacggtagctccacaatagaaaactgccagtgcgcaacctgtaccggttcatgcaatttaaacagacaaatcggtctgccattgatcatattttcactcaaaagctcgccacactgttcaaacccgcgacgccagcgttcagcagtggcgttttgatggcaacgcaaagaaatgtgatcggcagtcagcggagtgatattcaaccccagacggcgggaaagttcatctaatgcgtggataaatcgcggtaaatcgcttgcaatatcctgcagctcgtcgatagattgccagttcgccataatcactcttcgtctttcagtaaaagcgttaatttaccctgttgccctgtgccaaccaaccgctgatttcacgccgcttctgatgcaatagtgaaaacggcaatacgccacgcgcacgttgctgacgaaaacagccatttgcagtatactcccgccctaatttctttaactggtgcgggcaatttttgctcgcttcatcaatgtaaggtattccggtgaatattcaggctcttctcagtgaaaaagtccgtcaggccatgattgcggcaggcgcgcctgcggattgcgaaccgcaggttcgtcagagtgcaaaagttcagttcggcgactatcaggctaacggcatgatggcagttgctaaaaaactgggtatggcaccgcgacaattagcagagcaggtgctgactcatctggatcttaacggtatcgccagcaaagttgagatcgccggtccaggctttatcaacattttccttgatccggcattcctggctgaacatgttcagcaggcgctggcgtccgatcgtctcggtgttgctacgccagaaaaacagaccattgtggttgactactctgcgccaaacgtggcgaaagagatgcatgtcggtcacctgcgctctaccattattggtgacgcagcagtgcgtactctggagttcctcggtcacaaagtgattcgcgcaaaccacgtcggcgactggggcactcagttcggtatgctgattgcatggctggaaaagcagcagcaggaaaacgccggtgaaatggagctggctgaccttgaaggtttctaccgcgatgcgaaaaagcattacgatgaagatgaagagttcgccgagcgcgcacgtaactacgtggtaaaactgcaaagcggtgacgaatatttccgcgagatgtggcgcaaactggtcgacatcaccatgacgcagaaccagatcacctacgatcgtctcaacgtgacgctgacccgtgatgacgtgatgggcgaaagcctctacaacccgatgctgccaggaattgtggcggatctcaaagccaaaggtctggcagtagaaagcgaaggggcgaccgtcgtattccttgatgagtttaaaaacaaggaaggcgaaccgatgggcgtgatcattcagaagaaagatggcggctatctctacaccaccactgatatcgcctgtgcgaaatatcgttatgaaacactgcatgccgatcgcgtgctgtattacatcgactcccgtcagcatcaacacctgatgcaggcatgggcgatcgtccgtaaagcaggctatgtaccggaatccgtaccgctggaacaccacatgttcggcatgatgctgggtaaagacggcaaaccgttcaaaacccgcgcgggtggtacagtgaaactggccgatctgctggatgaagccctggaacgtgcacgccgtctggtggcagaaaagaacccggatatgccagccgacgagctggaaaaactggctaacgcggttggtattggtgcggtgaaatatgcggatctctccaaaaaccgcaccacggactacatcttcgactgggacaacatgctggcgtttgagggtaataccgcgccatacatgcagtatgcatacacgcgtgtattgtccgtgttccgtaaagcagaaattgacgaagagcaactggctgcagctccggttatcatccgtgaagatcgtgaagcgcaactggcagctcgcctgctgcagtttgaagaaaccctcaccgtggttgcccgtgaaggcacgccgcatgtaatgtgtgcttacctgtacgatctggccggtctgttctctggcttctacgagcactgcccgatcctcagcgcagaaaacgaagaagtgcgtaacagccgtctaaaactggcacaactgacggcgaagacgctgaagctgggtctggatacgctgggtattgagactgtagagcgtatgtaatcgatttttcgtgagagtgaagcctgatcagggttagccgatcaggcttttttattgccatctaaatgtattctgaaaatggacatgccattgttttctcactgttggataagaggccagaagcgtaatatccggccccagggaaacgataacggttgaatttaaggaataccgcagtgtttaaatttcttgtattaacattaggcattatctcttgccaggcttacgcagaagatacggttatagtaaacgaccatgacattagtgccatcaaagattgttggcaaaaaaatagtgatgatgatactgacgttaacgtgatcaaaagttgcctgcgacaagaatacaatctcgtcgatgcgcaattaaataaagcctatggtgaagcttatcgttatatagaacaagtgccacgcacaggtgtaaaaaaacctgataccgaacaacttaacttgcttaaaaaaagtcagcgagcctggctggattttagggacaaagaatgtgaattaatccttagtaatgaggacgttcaggatttaagtgacccttattctgaaagtgaatggctcagttgtatgatcatacagaccaatacgcgaactcgccagttgcagctataccgtaactctgaagatttttatccaagccctttgacaagaggataattcacatctttttggcatgttttgttgcaagctattcctgataaataattgcaacaagacatcgagcctttttcactgagttattaaacatactcgcgagcgcgtcgctacgctagcaagcaaaaatgaaacaggaataatcgaaatgggatgttgcgcacagtcaaaataactcaccgtaaataatcatctgctataaataatcactttcatgcaataccagataagctatttttaaacagacacttaccgcacaacaaactaattaaatacaaagaaaggcaacaatcaacttaatgttaatgaaatgttttacatatattaaccacttgtttaatgcggagaatcagtacactattttcttataattacatttgaaattatatgatcaccgggagtgattgattaattatctttactaataatcagactaatatttacctgtttgaccgagttgggattgcgtcgtttctccattaggagtaaagctttaatgtcacctgaagttcacagaataaggaacaggttatgagctatagcaatattcttgtcgctgttgcggttacaccggaaagtcagcaactgctggcaaaagcggtatctatcgccaggccagtaaagggacacatcagtttaattactctcgcttccgacccggaaatgtacaatcaattagctgcgccgatgcttgaagatttacgcagcgtgatgcatgaagaaacgcaaagctttcttgataagttaattcaggatgcggggtatcccgttgacaagacgtttattgcctacggtgagttaagcgaacatattctggaagtatgtcacaagcatcatttcgatttggtgatttgcggtaatcacaatcacagtttctttagccgagcatcctgcagcgcgaaaagagttattgccagtagtgaggtcgatgtgctgttagttccacttacgggagattaaccgctcttacgcaagctttggaaaggtagcaactttatcgcgctgctggctttccgcgcttcgcggaactatctgctttaggtcgctaatgaagcactcctgccagtggttaatatcgtttttcacgataacgtccagcatttctgcatgacgggaaatacgttccgccaggctcatagtcaatgcacgatccagcgcagctgcaacttcgtcacgatcgtaggggttaacaattaacgcgctcgttaactcgtttgccgctcccgcaaattggctaagaacaagaacgcccggattggctgggtcctgagcagcaacatactcttttgctaccaggttcatcccgtcacgcagtggcgtcactaagcccacgtcagagtagcggaatattttcatcagtaatttacggtcaaaatgctgattcaaataataaagcggcgtccagcctaattgcccgtatttaccattaattcgtccagcttcattttcgagctgatgacgaatatcctgataggcttgcacatcaccacggctcgttggtgcaatctgggtataacgaattttaccatgatgctgcggatatttttccagcaacgcttcataggcgagaaaacgctctggcaaacctttggaataatccagccgttcgacagaaaagatattttgtacgtttttcagttccgctttaagttgcgccagttttggcggcagtggcccggcagcctgtttggctatttctttcggttcaatgccgatcgggtagacttctgttcgaaatgctttgccccaggctgtatggctttttgcgctacgtgtcgtgacgcgggtcaggttagaaagacaatccaggaacgccagacgatcgttttctgtctggaaacccagcaaatcataatcacaaagctgttcaagcaaggtgtcatatgtcggcagcgcgttgaagatttccggtgtcgggaaaggaatatgcagaaagaaaccaatgcgattattcactccccgtttgcgtaattcatgcgcaaatggcaacaggtgataatcgtggatccagataatgtcatcgtcttgcaacagcggcagtaatttatctgccagcaacgcatttacgcgtagatagccgtcccaggcaggacgctgaaattgcaccagatcgagccgataatgaaaagcgggccagagaacggcattggagaattggttgtagtattcgtcaaggtcctgttcgctgaggttaaaagaggcccacgtaatgttaccttttttcaccttttttagcggctgatcctcattccctgtttcaccactccagccaaaccacagtccgcctgcggctttcagtgcccccagtatgccaacggcaaggccaccggcactggcggcgtgctcgtctggtggtgcaatccggttagatactacgactaaacgactcatagtcatcactcctgttatttttacttagatactacgactaaagctctcatagtcatcactcctgttattttctcttttttgttgtaatgcggtggttatcatttcaagccagctccagacatccggcacacccgccagtcgccaacttgcctgagttgcacctgtgccaatttttacactcattccgcccagtcggttaacgactgcgaagccagattcatcggttaaatcatcgcccagaaatacgggcgttcgcccgataaagggagcttcctgcataaaagctgcaattgcctcacctttactggtacctctcggtttgatctcgacaacacactttccctgctgtaacgccatttgtggccagatctgagtaatacgttgcgctaatgtcattaatgcgtcttcatgctgcggagcctgacgataatgcagcgcaaaagccatccctttcgcctccagctccgcgccgggatactgagcgatgactgtatgcagttgcacgctaatatcacgcgcaatcgcatccggcagatgaacgatatgtgttttaccattgatgtcacggcgctccgccccatgcacgcccgctaacgggaagcgataaggttttgccagtgcgtcaagctccaccatactgcgcccacttatcaatgccaatgcaccatcacttgcggttgccagtagctgtagtccttgcagaatattgtcaggcacgacgacctgatcgggatgcggtttgatttccgccagcgttccatcaagatcaaaaaaccaggcatatttcgcggatagttcaggggtttcggttaacggttctgtcacccggttctcctccttctcttttcttattgtgttgcgcagaacgcgctttacagacatgtaagtatagacagtgtgacgggggtcgccatttgcaacgaagaacagccaaccgttatggcggttggctatggtgggaaaaaacgctaaattgttgcagaaaaaagcatcagacagtgcgtttcgctttttgcttgtaacggtcgaagatcaccgctgccagcaggattaagccgcgaaccacgtactgcgcgaaaggagaaatattaagcaggttcatggcgttttccacggtgcctaaaattaagatacccgccaccacataactgatttttccgatgccacctttcagagaaacgccacctaaaacgcaggcggagataacaatcagctcataaccaatgctcgtcattggctgcccactggtcatacgactagccagaataattccggctatcgcacttaccaggccactgagaacaaagataataattttggtgcgaacaaccggtacacccgccagacgcgcggcctcttcgttcccgccaatcgccagggtgttacgaccaaaggtggttttattcagcagcaaaccaaagataatcagacacgcgacggtgagccagattggcgcaggcagaccgaaccagttggcgtaaccaagggcaaagaagctttcatcttcgataccgaccgctttaccgtcactaatgatgtacgccagacctcgaacaatctgcatcgttgccaatgtcgtgatcagagcatttattttcagtttggcgataacaaagccattgaccaggccacagagaacgcccagcaacaaccccgctgccacgccaatccacaggctttcagtcaggttaataaccaccgccgtggtgacacccgcacaggcaattacggaggcgacagaaaggtcaaagtcaccggaagcgaggcagaacaacatgccacaagccaccatcccgctcatggaaattgccaggcccaaccctttcatattaatgaaggtggcaaaatttgggacaaaaatggcacaggcgataaagagcaccgcaaacaccaccagcatgccgtactgatcccagatacgcccgaagctgaaactgctcttaggtgcgccagacccgcttgtagaaacagaagacatcatactctccttactcaggcaacagcctggctgactttaggcatcgcaaggctcagtgcctgacgctcatctgcctgctcgtgtaacaattcaccggcgatttcaccttcccgcatcaccacaatccggtcggcaacgccgaggacttcaggtaagtcgctggaggcaaacagcaccgccacgccctgcgccgccagcgcataaattacgttatatatttcgtgcttagcgccaacatcaatgccgcgcgtaggttcatccagcaaaatgaccttcatctcttcgcttaaccagcggcccagaatggctttttgctgatttccgccactgagattcatgatcagttgctccgcgcccggcgttttgatgttgaggctacgaatgtggtgatcggcattgttttcttcccaaccgttgttgattacacaaccgccgagcacatgtttacgtctggcactgatgttgatattgtcgcgaacggagtgcacgggaataatgccttccgctttgcgatcttccgggcagagcatcatgcctgcggcaatggcgtggctcggtttacgaatatcgatcggctgttggtcgatataaacctgaccggcggtgatttgcgtcccgccaaacatgcctttcattaattcgctacgccccgcccctaccagaccaaacagcccaacaatttcaccactgcgaaccgccagacttattggcgtacgcacgcctggtgctttcacagcatcaagacgtaggcgctcctcgccataactacgcggttgccagccgtagatatcgccaatgtcgcgcccgaccatcgcctgcaccagcgcgtcgtggtcaacctgctgcatatcggtaaaggttttgacataacgtccatctttaaagacagtaatggcatcgctgagggcaaatatttcttccatacggtgagaaacgtataagattacccgcccctcttttcgcagttcacgaataacgcggaaaagattgtcgatttcacgggcagagagggagctggttggctcatcaaaggcgataattttggcgttacgcgccagcgctttggcgatttcaaccatctgccactgaccaatggagagatatttcagcggcgtgtccgggtcaatatccataccaagatgtttaagttgtaaacccgcctcataattcagcaaactgcgattcacaatgccgcctttatgcggcagctggccgagatagatgttttccgcgacggtcatttccggcacgagatgcagttcctggtaaataatcgccacgcccgcgttaagtgctgcggtcgtgtcggaaaaggacatttcctgcccattaatcactacagaacccgtggttggcgcatagttgccgctgaggatttttaagagagtactttttcctgcgccattttcacccatcaacgcatgaacctgaccggcatagcagtcaaaactaatatccgtcagcgccttaacgccgggaaacgttttaccgatgccgcgaaaactgagatacggggtagactgttgcataacgtctccgtgaatcactggtcgttcacaccccctctgcatcatgcagaggggaatttttccggcaaattacttaccgcctaaaccttttttctccagttcttctttaaagttgtcacgcgtgatcagtaccacgtcggtaacttcggtaaattttggcggttcaacgtcttttgctacccagttgtaaagcatttcgctggatttatagccatgtacgtccgggcttggcagcagggaaccgtagaagccggttgcctgtgctttagacagttcgctcaccgcatccacaccgttaatgccaatgccgatgatatcggccgctttaaagccctgaccttccgtcgcgcgtacgccgcccagcacggtgctgtcgttcataccgacgatcagccaatgtttaacttccggatgttgaaccagcatactgttggcagcgtcaaatgcccccgggatgtcgttagatttggtaggtacctgataaatttgtttttccgggaatccggccgctttcagcgcatccatagatcccgtagtacggcggcgggcggtatccagttcgttggcggtaatcgccatcaccgcgctttctttgacatcccagccacgtttctgcatctctttatacagttcctggccctgacgttcgccaattttagtcgccgccatcatcaccagcggaacggtatccattggcttacctttggcgttaacaaactggtcatccacggcaatgactttcatatcgtagccacgcgctttcgcgacgatggcagagccgagtttggggtccggagtacaaataacgaaaccttttgcgccactggcagccaggctgtcgatcgcgttcaatgttttttcgccatccggcacggcaatcttaataacctcaaaccctaaatccttcccggctttatcggcaaacttccattcggtctggaaccacggctcttccggttgcttcaccagaaaaccgagcttcaggttctccgccatagcggattgactcataacggctgccagaccaatggctgccagggctttagtaaatttgtgcatggttctctccagctttagtgtcgttttgtgtagggcaaaaacgaatgacattcgttaaattaatcggaaaacaaagcattaccttttaactaaaagataagtgactgtgttgacatagttttagcgagaaattaattctccataggagagcaatatcacatcgcagaattacagtgagaacgtgcataaatttagcgggaaaagacataagggaaagccaatttgtcagacaaattgtcgaatgcacagcagattaatccataagattagcctggaaatccttgttgtctttggtacccatgcgggatgtcttctttttaaccagtcaataggccgcattacctggcgttgagtttttgaaatggtgtaataaccgcaactcaaagatgtggaaaatgcacgtcattcatttcgtcattaattatcactgtgctcattaattaacagaacacgtataatgagagccatctcgcaaaaatgaaaaaacgttttataaaatcatcacttcatcatgaattcaaattcattgattaatatcaacaagatacaaaaagcactatcattaaaattcattgcagttacattgatttcatcaatgaaatgtaaaaatatataaacttgatgatttaagcattttcttatacccgttcagacgttattcttatttcagatcatcgtcagaattgactccacgatcacatttcggaccggcagaaaggaattattctgcaaacagtaattatggtgttttgatttatcttgcacctctccacttctggatataaggatattaggtatggcaaccgctggaatgcttctcaaactcaactctcaaatgaaccgcgagttttacgcatccaatctctaccttcacctgagtaactggtgttctgaacagagtctgaacggcaccgccactttccttcgcgcccaggcacagagtaatgtgacccaaatgatgcgcatgtttaactttatgaagagtgtcggcgctacccccatcgttaaagccattgatgttcccggtgaaaaactgaactctctggaagaactgttccaaaaaacgatggaagaatacgagcaacgttctagtacgttggcacagttagccgatgaagcgaaagaactgaatgatgatagtaccgtcaatttcctgcgcgatctggaaaaagaacagcagcatgatggtctgttgctgcaaaccattcttgatgaagtgcgcagtgcgaaacttgcgggtatgtgccctgtgcagaccgaccaacatgttctgaatgtcgtgagtcaccagctgcattgatcatcatcggcgctaatgcattgcgccgatgaaggttttgagaaaccgctgcctcatctgtttgaagcagcggtttttttaatgggattcaccctgtggggtaaacttgagttcaataagcgcgatggctttttggattgcccgcatggtgaccgggtctgcggcggcgggatggttagtaaagtcgatattcttcagctgactggacattttttcacgaacttcaacgggcgcgattacatcgagaacatccagaatttgtttgataaccaactggcaagcaaccacatcagaaaccaattcctgatcggcattcagcggctgggacatcgtaaactcctgatagcattttgaaagccgttatagtagcgacttcacatcttcagcgatagtcacatccaccgtcatcaggacacaaaaaaacctgccggagcaggttttttgttatcggaacatattgcctggcggtacgtctttgaacgtcttgcaatagttattgaacatacttttcaggattttgcgcagtttcatcgcggcactccgaccatttgttatacaggtgttattgtctttgcgcttataatatgacaaccatcacaaaaatcaatctttatgtgatacaaatcacataaatacccctttaatgttataaaaatgataatcaaaaaacagcccccctatttctgacacctacagatggcaagaaatagcgcctgccaggcgtcttttccggccattgtcgcagcactgtaacgcgtaaaatagtgctttctcttactcttctggctggaccatgagacttctgattctgactcttagtttaataacgctggcggggtgtacggttactcgccaagcccatgtgagcgaagttgacgcggcaacaggtattgtacggttagtttatgaccaggcttttttgcagcatgcccataccgatcgttatgtcagtcgcgggatcgccgatcgcgcatgccagcaggaaggctatacccacgcggtcccctttggtcagccagtaggcaactgtagcctttttgcgggttccttatgtttgaatacggaattcactttgagttatcagtgccatcattccgccttccctgtctttctctaaatattttaatcagcgaggggatcttcgctgattaaagaaatagcggtaatgcgttttattcccattcgtatttttaataattgaagtttatattttaccttttgcaaataataaaataacaaattatagtgacgccacagcaacaaatataacctttgtggagcactatcatgctgaaaccagaaatgattgaaaaacttaatgagcagatgaacctggaactgtactctagtctgctttatcagcaaatgagcgcctggtgcagctatcataccttcgaaggtgctgccgcgttcctgcgccgtcacgcccaggaagagatgacgcatatgcagcgtctgtttgattacctgactgataccggcaatttaccgcgtattaataccgttgaatctccgtttgctgaatattccagtcttgatgaattattccaggaaacctataaacacgaacaattaatcacccagaaaattaacgaactggctcatgctgcaatgaccaatcaggactacccaacatttaatttcctgcaatggtatgtttctgagcagcatgaagaagagaaactgttcaaaagcattattgataaattaagcctggcaggcaaaagcggcgaaggtctgtattttatcgacaaagaactctctaccctcgacacacaaaactaatgctctccggcggcaggtttactgccgccgtttcaaatcagtgacggcaaatcttactctgatcggtgctaaaaccgtctttgctaggtataaatttgccttttgctgccagaaacgctaccagctctcccgctgtcatcccttctgcgctgcaggtgtgaaaacgtgcctgttcaccaaaacgcgctttaatcgcagcttccagactggcatgcgtatattgctcgccactttcaatcatcatatttaacacttcatgaccgtgaatagagtccatcgtccctcctcaaaaaaagcctagcgtagcgattgccgcttatgaagactttgcgccagcgcaggactgaatgctttttattgtacatttatatttacaccatatgtaacgtcggtttgacgaagcagccgttatgccttaacctgcgccgcagatatcactcataaagatcgtcaggacagaagaaagcgtgaaaaacagaaccctgggaagtgtttttatcgtggcgggaaccacaattggcgcaggcatgctggcaatgccgctggctgcggccggtgttggttttagcgttacgttaatcttgttgattgggctttgggcgttgatgtgctacacggcgctattactgctggaggtgtaccagcatgttccggcagataccggtctgggcacgctggcaaaacgctatctgggacgctacggtcaatggctgacgggcttcagtatgatgttcttaatgtatgctctgactgcggcatacatcagcggtgccggtgaattgttggcctccagcatcagcgactggacaggtatttctatgagcgcaaccgctggcgtgctgttgttcacttttgttgccggtggcgtggtttgtgtcggaactagtctggtcgatttatttaaccgttttctgttcagcgccaagattatttttctggtggtaatgctggtactactgctgccgcatattcacaaagtgaatcttttaaccctgccgttgcaacaggggctggctctgtctgcaatcccggtgatttttacgagctttggttttcacggtagcgtgccgagtattgtcagctatatggatggcaacattcgtaagctacgctgggtgtttataatcggtagtgcgatccccctggtggcatatattttctggcaggtggcgacgcttggcagcattgatagtacaacctttatgggattgctggctaatcatgctggattaaacgggctgttacaggcgttacgcgaaatggtggcctctccgcatgttgagctggcagtgcatttatttgctgatttagccctcgccacgagttttctcggcgttgcgttaggcttatttgattatctggctgatttatttcagcgtagtaataccgttggtggacggttgcaaactggtgcaattacgtttctgccgccgttggcgtttgcactgttttatccacgaggatttgtgatggcgctgggttacgccggtgtggcgctggcggtactggcattgattatccctagcctgttgacctggcaaagcagaaagcacaatcctcaggcgggttaccgggtcaaaggtggtcgtccggcgctggtggtggtgtttctctgtggtattgctgtgattggcgtgcaatttttgattgcggcagggttgttaccagaagtggggtgatcagatagcctcaaattccttattgggtgccagaattaacgctgacacccaatttggcctcttaatgcaggcagcactgcttaaatttcttaccactaccgcacgggcaaggatcgttacgccccggtttctcttctgctttgatcggttgctgaacagctttttcctgcggatgcgccatccagtacgcatgtagatcaagcgccgccagtcgaatggcatctacgctctcttcaaacgcttctgggctcatcttttctacccgctcgaagttttcctcagtaccgtgcagcgcaatcgcctccagcgctggttttaagctatcgggcaacgtactccagtcagaaagtgccacgccccgcatatagccaaagcaccactcctcaacaatcgtcagctcgctgccatcaacttctcgcaagccgaataacggctcaaactgctccgggaattcgttcagacgctctgcggtatcggccatatgttgaaaagccagattcataaagcgcgtcatctctttctcactcgcccagcgcggcacatagtcagccccaccccacacggcaaccagccactgttccggttcaatctcttgcggagaactcaacaccgccgtcaataaaccgtccagctccgccacatcaaggatggcgtggtcagtgttgtatttggtcagaatatcgtccagccattccaactcactttcgtttaacggtcccgttttcatacgcttttccttgtggatctcaactcgccagcacctatcttacatgccggtccgtatcagagatactttttgagtggctttgctggtgattaaaaattaaggagggtgtaacgacaagttgcaggcacaaaaaaaccacccgaaggtggtttcacgacactgcttattgctttgattttattcttatctttcccatggtacccggagcgggacttgaacccgcacagcgcgaacgccgagggattttaaatcccttgtgtctaccgattccaccatccgggctcgggaagaaagtggaggcgcgttccggagtcgaaccggactagacggatttgcaatccgctacataaccgctttgttaacgcgccaaattcttcaggcctttcagccagacatccgcttgacgccgatgtcttttaaactggagcgggaaacgagactcgaactcgcgaccccgaccttggcaaggtcgtgctctaccaactgagctattcccgcattcatcaagcaatcagttaatcacttgattttattatcgtctggcaatcagtgccgccgttcgatgcgttgcattctacttacctggcgcgatgagtcaacgatatttttcaccacttttgatcgtttgctgaaaattacgccgaaacgatcactgatcaagcaaatctgcacgcgcagcgctcaaatattgcaacatactccacagagtcagtaccgcagccacaaagaaaagtgcaataccggcgtactcaacccaaatgttcggacgccacagcagccatgccaacgccaccatctgggcagtggttttcactttcccaatccaggagacggccacgctactgcgtttacccaactccgccatccattcgcgtagcgcagaaataataatttcacgggcgatcatcgttgccgccggtaatgtcacccaccagctgtgataatgctcggttaccagcaccatggcgatagccacgagaactttatctgccacagggtcaaggaaagcaccaaaccgggtactctggttccagcggcgtgccagaaaaccatcgaaccagtcagtcaccgccgcgacgcagaaaatgagcgcggcggcaaacgggctccaggtgacaggcagataaaagaccaatacaaagaatgggataaggatgacacggaacagtgtaagcaacgtagggatattaaattgcataatgacgggtaactatctgttgtcagtaagattacccctatgttgctacagagacatcaatgtttcaagctccagaagatcttttctgccagaccttggctaatacccggcacttttgcaatttcctcgacgctggcgttacgtaaaccttgcaaaccgcccatatatttcaacaacatttgccgacgttttggcccgacgccttcaatggtttccagggaactggtatttttgaccttcgcccgttttttacggtgcccgccaatcgcgtgatcatgactttcatcgcgaatatgctggataacatgcagcgcgggactatctggcggcaaactaaatccctcaccttccggctcaaagaacagcgtttccagtccagccttacgatctgctcctttggcaacgccaagtagcagcggatgatttttatcccaactgacatccagttcggcgaagacatttttcgcctgcgcaagctggcctttgccgccgtcgataaggatcacatccgggatcttactgtcgtcaatggctttaccataacgccgacgcagcacctgattcatcgccgcataatcatcgcccggcgtgatgcctgtaatgttatagcgccgatactccgcacgcagcgggccgttagcatcaaacaccacacaggaagcgacggtttgttcgcccatggtatggctgatgtcaaagcactccatccgcttcacttccggcaatttcaacacgctggcaagcgcggtcagtcgctggtgaacggtagattgctggctaagtttgctggttaaggccgtcgccgcattggtgcgcgcgagtttcagataacgcgccctatcgccgcgaggtttggtttgaacattaatcttgcgtcccgccagttcactaagggaatcggcgagcagcgttttatcgctaagattaaaatcgagcaggatctcacccggtaaggtgcgcatctggctgccttgtaaatagaactggcctacgaaggtttctaccacctcgctcagttccgtaccgccaggcactttcgggaaatagctgcggctgccgagcactttgccctgacgaatgaacaatacgtggacacaagccatgcccgcatcgaacgccacaccaataacgtcgaggtcgtcgccggtattggaaacgaattgtttttcggtgacgcgtcgcaccgcctgaatttggtcgcgaatacgtgcagcttcttcaaactccagattctggctggcagtttccatacgactaatgagttgcgtaagcacctgatcatctttgccagacaaaaacaggcgcacatactcgacctgctgagcgtattcttcttcactcaccagtccttcaacgcacggtcccagacagcgccctatctggtattgcagacacggacggctgcgattgcgataaacactattttcgcactggcgaatggggaaaatcttttgcagtagcgccagtgtttcacgtacggcatagccattcgggaacgggccgaaatattcacctttggcatgcttcgcaccacgatgcatcgccagacgcgggtgggtatcaccactcaggaagataaaaggataacttttatcatcgcgtagcaaaacgttgtaacgcggctgatagagtttgatgtagttgtgttccagcaacagcgcttcggtttctgtgtgagtaaccgttacatcaatttgctggatctgggcgaccagcgcttcggttttgcggctagcgaggttgctacggaaatagctggaaagccgttttttcaggtctttcgctttgccgacatagataaccgtaccaccagcatcgtacatgcgataaacgcctggctggctggttacggtttttaaaaacgcttttgcgtcaaactgatcactcactgactacttaatgtctccgcattacacagaccatggcgaattgccaggtgagtcagctcaacatcgccatgaatgtttagtttactgaacatacgatagcggtagctgttcaccgttttcggactgagattgagctgttcactgatctcattgaccttctggcccttggtgatcatcagcataatctgcaattcacgttcagacaaactggcaaatgggctttctgttttttctggttcgatctggcttaacgccatttgttgagcgatgtcagaagcaatgtaacgctgcccactatagacagaacgaatcgcactcacgacttcctgcggagccgcgcctttgctgaggtagcccgcagcaccggcctgcatgactttcgctggtaaagggttttctgtatggacggtaagcatgatgattttgacatcagctgtggaacgcgcgattttacgcgtcgcctcaagaccgccaatgcccggcatactcatgtccattagcaccacgtcaacggcatttgtccggcaccacttaacggcgtcttcaccgcagcttgcctcaccgacgacttttataccctttatatcttccagaatgcgtcgtatccctgcgcgcaccagttcgtggtcatcaacaagtagaacgttgatcaaaggaatatctccagaaatagggataacgctactgatagttagtcattcgtatattagcggtttttattgcaactttgaaacgttaaaaatggtgggtattcgatttttctctcgtttttgtcaattcgattgtccacagttatggtcacgcccgtcaccaacggcttaccggatcgtttcacagtaagccctacgatgaaatgtgacaaaaattgactttattcagcaaaaatgaaaatcagcccgctgaatatgtaacattaattaacccgaacaatacgggcaaaaaacattcatgataaaaatatttattggtcattatattaacgtattttatagcactgccgatatcacgctcaaaaaacaaccactgctatttttagcaaagcttatggtatactccgccgccttaacatttttcaccgcaaattttcattgcaacatgacgaggaaaataaatgagtacgcctgatttttctactgccgagaataatcaagaactggcaaatgaagtctcctgcctgaaagcgatgctgacgctgatgctgcaggcgatgggacaagctgacgcgggccgcgtgatgttaaagatggaaaaacagcttgcgctgatcgaagacgaaacccaggctgcagtattttccaaaacggttaagcaaattaaacaagcctaccgtcagtaatataaaaccggctgatagcgtgcctttcagccggtttttgcatctggcacgcaggacagaaaagagatcaaattaagccagtagcggccgcgtaacaggcaacctgggtcttatttggtgcattaatttttttctgcatgtttttctggtggaaattgaccgtattctcagagatactcaaaatcatcgctatctctgcacttgttttcccttccgccgtccacctcagaatttctttttcgcgcttgctgaaattcatctctggcgtcatcactatttcatcatttaaacgcatcagagccatcagactttcgcgcaccagtaactgcatttttaattgcagttcatcactaagaatgggtatttcgcgcgcgctgcaacgggaaaaggacaaaaagcccagcgcccggtttggcagcattaaatactgagtgacaccgcggcgtaaaccatgtgcgcgcgcggcttcccataacggctgtgcttcgctgaataagtcatcattccacattaaatggccctgactaaagttttcagggttcagcaccggatcaattgcgagaaagttttttgcctgataataactaacccacgcctcagggtaattggtgtaaaaagccactttaggtcgagtgaatggtaccgggtggcggacacataagctatagtaatcgtactccagctgctgagcctgaagctcaatttcatggtagacctcttctgcggtctccatcctctgaaaacgcaacagcatcgtgcgacgccagctgaaaaaatccttatcctgcatagtaaaccgcaacgcccttgagagtgagtatcatttataatgataattcaaactatcacataaataagatttatatataatttatattattcaggcaatgaattacttttgcaagccatcgcattctcttatgttattaatgagttatgctgatttgttaagcagttttatcaggcttgaaatggcgtccagccccgacaggtgaatcgtcggggctgattttttcttattattgcagcagaaacttctcgaggaactggcgggtgcgaggctgctcggttccgtaacgtttatcatgttatcctaaggattatccgaaaaataatacctacgaacatcttccaggatactcctgcagcgaaatatttgttttaagctcactcacatatcgcaacatttactttactttaagacaattccaggcaaattatacaacactttacgggatagtaagtccgcctgaaaaatcgcgagagtggcgcattaggtgacccatgttgttccgtttagtcatgatgaaatattcaggtaaggggaattatcgttacgcattgagtgagggtatgccatgagtacgattattatggatttatgtagttacacccgactaggtttaaccgggtatctgttgagtagaggggttaaaaaaagagaaatcaacgacattgaaaccgttgatgaccttgccatagcttgtgatagtcagcgccctagtgtggtgtttattaatgaggactgtttcatccacgatgcttctaacagtcagcgtatcaagctcatcattaatcaacatcccaatacgttatttatcgtttttatggcaattgccaatgttcattttgatgaatatctattggtcagaaaaaatttattgatcagttctaaaagcattaaaccggaatctctcgacgatatccttggcgatattctgaaaaaagagacaacgataaccagctttttaaatatgccgacgttaagtttgagccgaaccgaaagcagtatgttgcgaatgtggatggcaggtcagggaaccattcaaatctctgaccaaatgaatatcaaagccaagaccgttagtagccataaaggtaatattaaacgtaagatcaaaacgcataataaacaggttatctaccatgtcgtccgactgacggataatgtgactaatggtatttttgtcaacatgcgctaacacattctgactggtggtttcccaccagtcaggctgaataagattactctgctttctccacaaagataccgtcctgatgccctgcttcattaaagaaccagatgccgagcgggtagtcttccaggctaaccaggtacattgtgccttcactaaactcctcaactgccagtaccacgccaggacgacgcggaccgccatccgttttgactgttacccgatcattcaccttcatcgttttcctcctgtggctttgtgccagtgtagaacaatttcgtttttctggcagcgccaggcgcgcgcgagtgctgattttctcgacggtctatacttaagagatgccaggcggacttaacgactggcggcaacaacagagtaacggttgcgaggaaagatgatgaaaaccgcaaaagagtacagcgataccgcaaaacgtgaggtcagcgtcgatgtcgatgccctgctggcggcgatcaatgaaattagcgaaagcgaagttcatcgcagccagaacgattctgaacacgttagcgtcgatggacgtgaatatcatacatggcgtgaattggcggatgccttcgaactggatattcatgacttcagcgtctctgaagtgaatcgttgaatgcacaataaaaaaatcccgaccctgagggggtcgggatgaaacttgcttaagcaagaagcacttaaaaaattcgttacaccaggaaatctgatgtgttcatcaccttatccgcaatttttttcgctgacaagaaaatattcgccatatgaatgattaacgctacttatgaatagaaatgtgacgcacgtcaccccttggtggctctggcgtcagcgggatcgctcccgaaaaaatcatctttgataatttgtgcggttttgagaatcatcctggtaagaggagtactgcgcgactatgtttagtattcaacaaccactactggtttttagcgatcttgatggcaccctgctggacagtcatagttatgactggcaaccggcagccccctggctcacccgtttacgcgaagcaaatgttcccgtcattctctgtagcagtaaaacaagtgcggaaatgctgtacttgcaaaaaacgttggggctacaaggtttaccgctgattgccgaaaatggcgcagtgatccagcttgctgagcaatggcaggagatagacggttttccacgcatcatcagtggtattagccatggcgaaatcagcctggttttaaatacgctacgcgagaaagaacattttaaattcacgacttttgatgatgtcgacgatgcaaccatcgccgaatggacgggattaagccgtagccaggcggcgctgacgcagcttcatgaggcgagcgtaacgctaatctggcgcgacagtgacgagcgtatggcacaatttaccgctcgtctgaacgaactgggcttacagtttatgcagggtgcgcgcttctggcacgtactggatgcttctgccggaaaagatcaggctgccaactggattatcgcgacctatcaacaattgagtggcaaacgcccaaccacacttggcctgggcgatgggccaaacgatgcgcccttactggaggtaatggattacgcggtgattgtgaaagggctaaatcgtgaaggggtgcatctgcatgatgaggatccggcccgcgtctggcgaacgcagcgtgaaggaccggaaggatggcgtgaagggctggaccattttttctccgcccgttaagcgttatcgctcgcgaatacccgattacgcccagcctgtttagcgagataaagccgacggtcggccagactctggagttgttcaaaatcataatcaccggtttcctcgctgctgcttacccccaggctggcactgatgcgtatcgtcgtactcttggcgatcaacatctctttttcatttaatttcagtcgaatacgttctgcgacctccgcagcctccgtcagactcgcgcctggcagaatcacacaaaactcctcaccaccgacccgcccggcaacgtcctgcgcacgcaaggaactgctaattaatccggcagcatgagaaagaacacggtcgcccgcctgatgaccaaagcggtcattaatcgctttaaaatggtcaagatcgacctgaatgacagaaaaaggatgttggtgcgtctgacacaatttagcgagcggacgggctttttcgaacagtgcgccacggttatataaacgcgttaaggtgtcgtgccacgcctgccactgcaagctgctttgcagaacatacatgttgctaaccatccggcgaatcacataccaggagatgagtaacatggtggtaaagagcgcccacagcagggttaatgcaatgctgatactgccgaaatcgccgcgcacgccttcgcttaacgtatggacacgcaccagcacaccgtcgaaatggtccagacgttcccagctaacatagcgactgtccatacgaatgccgccccgcgtgtcatgttccattgcctgcgccagcaaggccagttcacgaggatcaaaaatattccctgttggatggtcaggattggaagaggtcaaaaatctcagcttactgtcatagagctgatactcaccatcgaggtttttatcgatggcgtttcttaaaaattgctgcatagtacgcacgggaatactcatccccagcacgccataccagtagttattactgtctaccggaacactgacggtaacctgcggttcagtattgctggcgtgttccggttggctagtgaaccagcgtaccgcgcggtgacgattttctcgttgactatggccaataaaccagggttgggtgacatagccgtaataacgcgttggaacattgcgcgtaaacaaggtcggctgcgtgctaacgtaaaatccggcacggctgacatacatcgcctgttcaaccatgctgctggagttgtgcgctagtcgcagcaagtaaccaacttccagtgcagcggtaatttcattgtcgaggctttcattttcgcgagacaggagattcccctcgctgactaatgcatcgctcacaccattaactggcagagtgcgtcgtcggttgagttcgattttccaggcgtgctcgtcgcgatgctgttcgaactcggttacagcatcacgcagagaggtgaaatccagtggcgctacgagagcttcgcgcatgccattacgtaaaaagatcagtttgtcgacgttatactgcaaatgcttatcgagcgcgttggcaacgttttccagatgattacgctggctggagatataggcatcttccagcaccaccacttcacgccaggtgagcaaggtggaaaaaagcaataccacgataaagcagagattaacgacatgaccaggccccaggcggcgtgcgagttttttcaaccagctctggttttccatttttgtctcgtgctgcaccctgacgactcccaacctgcttttttatgattctggcataacctggcgatagcgtaccgcaaaacagcgataattttataatggtggcatgataagacgcgactatcattcattgcaggcattagcacaccaggccggatgtgatccggcctgatgttaatgataccctttcacacttcttccgcagaacgactcccctcccccggaacaagctcggtttcatgaaaagcttcccgcttgaccccgtaaccgtcataccaacgacactcaaccataccgctggagtatccagtgacaatcatccgcgggccgccctctttaaccgtaacttcctcactaaccataaagctcatactcgcctccttttttcgagtgaaacttgttcaccttagttgaagatggcgaattttgcataatagccagtgcgagtattaatgtgcctgaccgcgcattttctctacggctttcactcccagcaccacgatgccgccgatgataaatccaagaatcagatttaaaacagtcggtaatatcatcgccactactgcactttgctgcccggcgaaatgttcaatggcgtgatgcagcggcgcaattccatgtaccacaatcccaccgccgacgaggaacatcgccagcgtgccgacaatgcttaacgctttcatcagccagggcgcgataatcaataaccctttacctaatgcctgcatcagcgcgctggatttttccgccagccaataccccaggtcatcaatcttaacgataacccctaccagaccgtagacgcccacggtcactaccagcgcgatgccactaagcaccagcacctgattaagcaacggcgcttcggccacaatccccagcgtgatggcgacgatttccgcagacaatataaaatcggtacgaatcgccccttttattttgtccttttcaaacttcagcggatcctgcgccgccagcttctccagacgctgctggctctgcgccggatcttctttatgtttacgcgcctccagcatatgcagcactttctctactccttcaaagcagagaaacgcgccaccaatcatcaacagaggcgtaatcgcccacgggataaacgcactgatgatcagcgccagcggcaccagaatcactttattaatcaggcttcctttcgccacgccccagaccacgggaagttcccggttggcccgcacgccactaacttgttgcgcattgaggcttaagtcatcccctaatacaccggcggttttcttcgccgccagtttgcccatcacggagatatcgtccagtagtgtggcgatatcatcgagcaacgtcagtaaactactcccggccaaaagcattccctctcatttttattgttgaagggtgtaagtatgaagcaaaaacggcagctctgatacttgcttcacaggtcaacatttttttaacaatcaagtgcaattatatctctcgccagcagaatgattttcacgtttactatgaaccacctttttatttccaccgtgagggattatgcgtttccgccagttgttaccgctttttggcgcgctgtttgcgttgtatatcatttggggcagtacctattttgtcattcggattggcgtggaaagctggcctccgttaatgatggcgggcgttcgattcctggcagccggtattttattgctggcatttttgctactgcgcggacacaaactccccccgctacgtccgctgctcaatgccgcgctgattggcctgttattgctggctgtcggtaatggcatggtgacggttgccgaacatcaaaatgttccttccggcatcgccgccgtagtggttgcaaccgtgcccctctttaccctgtgcttcagccgcctgtttggcattaaaacgcgcaaactggaatgggtgggtattgccattgggcttgccggaatcatcatgctcaatagcggtggaaatttaagcggcaatccgtggggcgcgattctgattttaatcggcagcattagctgggcgtttggcagtgtttatggcagccgcattaccttacctgtagggatgatggcgggtgcgattgagatgctggcggcaggcgtggtgttaatgatcgcgagcatgattgcgggtgaaaaactgacggcgctcccttcccttagtggcttccttgcggtcggctatctggcgctgtttggtagcattatcgccatcaacgcttatatgtatttaatccgtaatgtcagtccggctctcgccaccagctacgcttacgttaacccggtggtcgcggtcttgctgggtacgggactgggtggagaaacactgagcaagattgaatggctggcgctcggcgtaattgtcttcgcggtggtactggtcacgttgggaaaatatctcttcccggcaaaacccgtagttgcgccagttattcaggacgcaagtagcgagtaatcaagcgagtaaatgaatcccctgcgtgtcgatctgcgcgctggcaccttcgccgcagatccactcttccagacgctcggtaagcgcttcatccgtcagcttctcgcgcccacgtaacgcgcactcccagacaatcaatacgcgccagccgagttcctgcaagcgactgatatcgcggcgatcgcgctcaacatttttacctatcttctccagccagaactcggttcgagtcgcaggcactttaaacagatagcagtgatgatgatgccagaagcagccatgggtaaatatcacgcagcgatattcatcaacgacaaaatccggacgtccgggcagactggcgtcctgaacgcgaaatgccaggccctgcccggttaacagactggcgaggcgcttctctatcgccgtatcacgcgtggcaatcgcgcgcatatttttgctgcgagtggccttatcgtgaacgtcggccatgttgtgcctcttgctgacgcttagttatcgactacgtcggccatgttgtgcctcttgctgacgcaacgccaccgcctgtttgatttttggctcaagcagttttgccaccgcggcaaagaccggcacgaccacgctgttaccgaactggcgataggcctgagtgtcgctaaccggaatacggaatttcgcttctcccggcgcttcaaaacccattaagcgcgcgcattcccgaggcgttaaccgacgtggacgatgttgctgattcagcggatcgtcaaagtctttctcacccgtggccatatcccagccgcgatcgattaaaatttccgcgccatctttgtaataacgcgcagacagcgtacgcgtgacgctttgcggattgttcggataaaccattccataaccgaagccgttaccgcgcgcctgatgttttttcgcatatcgatagaggtacttccacagcaccggcgtcaggatatatttcgcctcgaccatcgggtccaacagctgcgccagcgtcactcgctgcgcagggaaacattcgctgatatcacgcagggtaaaatcggctttcagattcagatcgcgacgaaaacccaccagcacgatgcgttcacggtgctgcggcagaaaatgtttgccgtcgatgattttcggatcgtctggcccattatcttctgcatcagccacgtcatagcccagttcgtccagcgtctgcatgatgatgcggaacgttttaccctggtcgtgacttttcaggtttttgacgttttcgagcacaaacatcgccggacgacgcgcgtcgataatgcgtaccacatcaaaaaacagcgtgccctgggtatcgcaggcaaaaccgtgcgcccgcccgaggctgttctttttgcttacgccagccaggctaaatggctgacaagggaaaccggccagtaaaacatcgtgttcaggaatgtgttgacgaatatgttccgccgccgcctcatcactcacgccttctttatggctgagggtgatgtcgcggatatcttcattaaaatgatgcgtcgccggatcgcaataatggttggctttataagtgcgtaccgcatgtttgttccattcgctggtaaacacgcactgtccgccaatgctttcaaaaccgcgacggatgccgccaattccggcgaatagatcgataaagcgaaacgcataatgcggatgatgtgccggtggtttgggtaataacgtttgcagatgggcgaactctttctcacttaaacggtgccatgcgctgtcattcgccagcgcacgttttaaaattgccgcgctccagtgattctcacctacaccattaagctgcgccaccaacgttttaacatcataaatttgcagcagtttctccagcattgcctgtgcggcattcccggtgctgtaactatcggttacacttatattttcctgcatagatttcaccggccatctgagatggccgacaggttaacataattacagccatttagggccacgcgctcagccagcggaactaaacgcatctatcaccttgtgatcgacaccttcattctcccccgccagttcggcactgagcttcgccataaactcgactaaaaaatgcgcgttgtgctgcgccagctgcttgcctcttgcggtttgcatggtttgcggtagcttcagcaacttagtctggaaatgatccagcgcgtagcgtttatcatcaagcgggcgatgctgtgcgaacggatcttcaccatcaaacagcgccacgcccaatgccccactaacggcaaacacgcgcgccaggccaatcgcccccagggcttccagccgatccgcatcctggacaattttagcttccgttgttaagggggcgatttgcgcgctgaaactgtgagcggcaatggcatgacaaacggcctcgattttctccgccggaaattgctcgaactcttcacggagcaggcgacgcgtctcttctgccgccaggatactagaacgctgcctttgcggatgatttttcgccaggctcacaatatcgtgaaaataacaggcggttaaaatcaccagcatatcgacatcgtcatctgccgccagcttctgtgccgtagcccagacgcggcgaaaatgacacacgtcatgggccgcgtcctggtgctgatgatggtttttcaaccagttttcgaactgtgcctgccagtgttgtaagtccatacgcgctccgttgccaaagagtcgccaccttagcagtttttattcatagcgtctgctacgtgcgggacgaggtcgggtgtaccaggcaatgctgcctaacaatgccccgaccagagccataaataaaaatccgaccagtgcccctaaccactttcccgcggtagagcctaaatcgctttcaaatccgctcacgggggcatcgggaatccggctcatcacccagatgtaacgcgccattgcccagacgaaatagccacaccatgtatagaaagcccacaaagccagtttgccgccagggctgcgagagagtctctcttccatctttgtgctaccgtattccattttgagataacccggaaaattcagacttagtactattatgtgataaaagtcacatttttccacattggatgagccagtcaagactcaatcattttttgaacaaatagataaattttgcgcaacggcagtgaatacaggaaaaatcgttttgagcgattttatttatctttgatatcggctttattaattcatttaatcaatatattagcactgattacaattatacctttttattattctgtgtcatgatgcttccgttattagccttttatcgtcttgtttatattttttgggccggcatgatgccggcttttttttatgccttcattaatgtgcgcctgatcacaccagccgtttggcgcaacaatcattgataccccctatgtttccgctcaactcataacatattgatatacatttataattttcatgaatatttatatttagaattcataattatgaattatattaaatagattagaaacattttgatatcttttaaatacatttgttacatgtaatccttaaaataaaatgaacttcatagaatagtatccaaatgtgcttttttttggataacggcacttattgatatattcatgaagattataatcacaagggaatacataatgaaaagaaaagttctggcaatgctggtcccggcgttattagttgctggcgcagcaaatgcggctgaagtctataataaagatggtaataaactggatttgtacggaaaagtagtgggtctgcactacttctctgatgattctggcagcgatggcgacatgtcatatgcccgtatcggtttcaaaggtgaaactcagatcgctgatcaattcactggttatggtcagtgggaatttaacattggcgcaaacggtcctgaaagcgacaagggtaataccgcaacgcgtctggcatttgcaggtttaggctttggtcagaatggtactttcgactatggtcgtaactacggtgtcgtatatgacgtagaagcatggaccgatatgctgccagaatttggtggcgatacctatgctggcgctgacaacttcatgaacggtcgtgctaatggtgttgcaacctaccgtaacaatggcttctttggttaggtcgatggcttgaactttgctttgcaatatcagggtaataatgaaagtggtggaccattcgggcaggaaggttccggtagtggtgatggccgtagcctttccaaagaaaatggtgatggtttcggtatgtcaacatcctacgacttcgacttcggtttaagtctgggtgctgcatatcaaactctgatcgttcagatcgtcaggttggagttggtttaaatgatcgtaaccatagcaacagaaatgctggtggtgaaaccgctgaagcatggactgttggtgcaaaatatgatgctaataatgtgtatttagcagctatgtacgctgaaactcgcaatatgaccccatatggtggtggcgagtttgataatggtgaatcaagatcagccatcgctaacaaaacccaaaactttgaagttgttgctcagtatcagttcgactttggcctgcgcccgtccatcgcttacctgcaatctaaaggtaaggatttaggcggttgggctcatgacggcaacggcgacccacgttacaccaataaagatctggttaaatacgttgatattggtgcgacctactacttcaacaaaaacatgtccacctatgttgattacaaaatcaacctgctggacaacgacgatgacttctacgaagcaaacggcatcgctaccgatgatatcgttgctgtgggcttagtctaccagttctaatcagtcaactcgctgcggcgtgttactgtaaaactgaacactagcctgagttcgtccctcatcgaactcaggcttttttattggcatttcatctccatctgcggcacacgcaattgccgaagcatatcgatacagcaccttaccctgcccctcctggcacaataacatcaaccagctactcttcaagctaacacccaaatgcatttctttatgaattaatccgtaacaaacacgcttcccatatagaaatatttgcaaaaatagtgcatgaaataagctttttctctaccaatccgggatataaatattcatcagcaccacaatattccacagcactaaatctctccccgccaccccgtacctctgataatggtctaaaatcattgaagccacttgcgacgacgttgctcaataaggaaaatttggcgtgaataatattcaacaccagtgcagcatcatcattacatacttacagccgccgactaccgctttcgatatattgactcaattttccagcctggttaaaaatagcgaccagctcagtcgcaaatatagtgactaccctaactaagcaacaataaggaatacactatgactgttcaaacaagtaaaaatccgcaggtcgatattgctgaagataatgcattcttccctagtgaatatagccttagccaatataccagtcctgtctctgatcttgatggcgtggactatccaaaaccttatcgcggtaaacataaaattctggtgatcgccgcggacgaacgttatttgccgaccgataacggaaaactgttcagcaccggtaaccatccgattgaaacgttgctgccgttgtatcatctccatgctgcaggtttcgaattcgaagtggcgaccatttccggtctgatgaccaagtttgaatactgggctatgccgcacaaagatgaaaaagtaatgccattctttgagcagcataaaagcttgttccgcaatccgaagaaactcgcggatgttgttgccagcctcaacgctgatagcgaatatgcagcaatctttgttcctggtggtcatggcgcacttattggtttacctgaaagccaggacgtggctgccgctttacagtgggcaatcaaaaatgaccgttttgttatctccctttgccacggcccggcggcttttctggcgcttcgccacggcgataacccactgaatggttattccatttgcgcattcccagacgccgcagacaaacaaacgccagagattggctatatgccgggtcatctcacctggtacttcggcgaagaactgaagaaaatgggcatgaatatcattaatgacgacatcaccgggcgagtacataaggaccgtaaacttctcaccggcgacagtccttttgcagcgaatgcgttgggtaaactggcggcgcaggaaatgctggcagcttacgcgggttaatccctgttacgtttgaatgtaagcgcataatcaatcgcggccgcgttagtactcacgacgtggctgcgttttttcacggttaatttatggcgtactgaagccctatgttaatttctttgcggtaacgtaatccggaacacattatgcttattgagatagtgatacgtagcacttcccccatgcaattcggcaatcgctttgactaaagaaaggcctagtccctgacctacggaatgacggctattatctccccgccaaaatctacggaagagtttttcaggctcattaattttcgttccagggctggcgatatcaatattaagatagctgttggtatcaagaaaactggttatatgaatacggcttttttctgggctatatctaatggcattaacaataagattgcttaacattcgttgtagtaaaattttatccgcaaagatttgctgattgcactcgaccttaaagcaaatctctttctcgtcactaaggtattcaagatagtccaacaaattttcgacttccttattgagagaaaggctgtccagtttcaccaaaacattgtttttatctgccctggcaagaaacagtatgttctctgttaaccggctaatattttccagctcttcaatgtttccggcaattgttttttgatattcagcgatacttctggtttgactgagcgtaacctgattctgacccagtaatgcattaattggcgttctaagttcatgagcgagatcgtcagcaaactgacttagacgctcaaaatctttgactaaagcatgatgcattttattcaacgcctgcccaagaggttttagttctctcggtaatgcgctaacctcaacaggctctcggctatcgttataattcagcgcttccgttacaccactcaactttttgatctctcgtaatcccgttctgattaacagcggacttaatacactgcaaagtacaatggcgacaatgcaaattataatgctattaattttatactgttcaagcatgttatgtctggcactagccaatttagccacagtaaccgttaaacttgggctaacttcatcaatattaattcgtaaagcatctatctctgtatcattaataatgcttctgtaaatgccagctgcgctgattgtctcactagcaggtatgttatttaacatgccatcactgacatttgtccggttaacaattttattgatgctatcaccatgaataatcaagatatcctgactaacatccatcatccggttaaagtacacaggtaacgtatctggatttaccccatcaattaacaactgcttgatctgcgctgtccggttaatgagtgttgtatcatcgcgccatttcaactcacttgccaggccattatagagagtccagacaattccggcgccagcaacagacagtagcaatataaaaagcaaggttaaacggacggttatagatagtcttttcattatttttttaccgctacgaaactatagcccatcccccggattgtggcaattagcttttcaggaaaaggatcatcaacttttgcgcggagcctgcgaatggcgacgtccaccgtattggtatcactatcaaagttgattccccaaatttcactcgcaataaccgttctgggtataatttcgccagctctggaggccagtagccaaagtaactgaaactccttgcgcgtcagtgtaatactgatattgtccctgctcacactatgactaacagagtccattcttaagccgctgatttctaatgtactattcaaagcgtgatgttgccttaattgtgcccgaacccttgccagcaactcagaaaaactaaaaggttttaccagataatcatttgccccactgtccagccctctgactctgtcatcgacagaatcccttgcagtaaggcaaataacaggggtttgctttgctgttcttaacgtttgtaagatctgccagccatccatacccggaagcataatatccagaatgatcaatgcataatcatccttcagcgcaagataaagcccatctctgccatcagaaacggcatcgatgacataacccgcttcggaaagcccctgcgttacccattcctgggtcctttgattatcttcaataagtagaatcttcatgaaaataatatgccataaatcatatgttatagaaacagcctggttcattacaaaattgtaatgctgctgtaaggttaccctggacgctttttcgctatcctcaaaactcattcacatgacaaggatataaacatgttaaagcgttatttagtactcagcgtagcaacggcagcatttagtttaccttctttggttaatgccgcacaacaaaacattcttagcgtgcacattttgaaccagcaaacaggaaaacccgctgctgacgtgacagtcactcttgaaaagaaggcggataacggctggttacaacttaataccgccaaaacagataaggatggacgaattaaggcactgtggcccgagcaaactgcaactacgggcgattaccgtgtcgtatttaaaaccggggactatttcaagaaacaaaatcttgaaagtttcttccctgagatccccgttgaatttcatattaataaagtgaacgagcattatcatgtgcctttattacttagccaatatgggtatagtacctatcgtggcagttaatgcataaatatgtaaaagcagatctctgctactgttagggaggacactccctgacagattaacagtaaacggctcttgctggctaacgacaaaaaagtgtgatggcttatgaaaaagaatcaatttttaaaagaaagtgatgttacggccgagagcgtattctttatgaagcgtcggcaggtgttaaaagcactgggcatcagtgcaactgcactttctttgcctcacgctgcgcatgccgatctgcttagctggtttaaagggaacgatcgcccgcccgcccccgccggaaaagcgctggagttcagcaagcctgccgcctggcaaaataacctgccactgacgccagcagataaagtttccggttataataacttctatgaattcgggctggataaagccgatcccgccgctaatgctggtagcctgaaaaccgatccatggacactgaaaatcagcggcgaagtggcaaaaccattgaccctcgatcatgatgacttaacccgtcgcttcccgctggaagagcgtatttatcgtatgcgctgcgtggaagcgtggagcatggtggtgccgtggattggttttccgctgcacaaattgctggcgcttgccgaacctaccagcaatgcgaagtatgtcgctttcgaaacaatttatgcaccggaacagatgccaggccagcaggaccgctttatcggcggtgggctgaaatatccttatgtcgaaggattgcgtctcgacgaagcaatgcatccgctcacactgatgaccgtaggtgtttatggcaaggcgttaccgccacaaaatggcgcgccggtgcgactgattgtgccgtggaaatatggctttaaagggattaaaagcatagtcagtattaagctgacccgcgagcgtccgccaaccacctggaatctggcagcgcctgacgaatacggtttttacgccaacgttaatccgtatgttgatcacccgcgctggagtcaggctaccgaacgatttattggtagtggcggcatcctcgatgtacagcgccagccaacgctactgtttaatggttacgccgcccaggtggcaagcctgtatcgtggcctggatttgcgggagaatttctaaatgcgtctgacagcaaaacaggtgacatggctgaaagtttgcctgcatcttgccggattgttgccgtttctctggctggtctgggcgatcaatcacggtggactgggtgccgatccggtgaaagatattcagcattttactggtcgcactgcactgaaatttttgctggcgaccttgttaatcacccctctggcacgctacgcaaaacagccgttattgatacgcactcgccgcctgttaggattatggtgctttgcctgggcgacactgcatttaacaagttacgcattgctggagctgggcgtgaataatctggcgttattaggtaaggagttaattacccggccttatttaacgttaggtattatcagctgggtaattttgcttgctttagcgttcactagtacccaggcgatgcagcgaaaactcggcaagcactggcaacagttgcataatttcgtctatcttgtcgcgattctggccccaatacattatctgtggtccgtgaagattattagtccgcagccgctcatctacgctgggctggctgtactgcttttagccttacggtataagaagttgcgttccctttttaaccggttacgcaagcaggttcacaacaaattatctgtataacttcatattgccgacaaagtacgcgttatccctgccggatgtggcgcgagcgccctatccggcatacacagatcgcatcaggttatgtttcgtttgtcatcaacctcaaatcaccaaaataatttattttatttcaataagatagataagtagaactgagaaagccatgctctcgtttcctaagagttgttgcattttgctatatgttacaatataacattacacatcatatacattaactctggaggaaactgttttggcgattcgtctttacaaactggctgttgctttaggtgtctttattgttagcgctcctgcctttagccatggtcatcacagtcacggcaaacccttaacagaggtcgaacaaaaagctgctaatggtgtttttgatgatgccaatgtacaaaaccgaacgctcagtgactgggatggagtctggcaatccgtttatcctttactgcaaagtggcaaacttgaccccgtctttcagaagaaagcggatgcagataaaactaaaacatttgctgaaattaaagattattatcacaaaggttatgcaacagatatcgagatgattggcattgaggacggcattgttgaattccatagaaataatgaaacaacaagctgtaaatatgattacgatggatacaaaatactcacctataaaagtggcaagaaaggcgttcgttacttattcgaatgtaaagatcctgaaagcaaagcccctaaatatatacaatttagcgatcatataattgcaccacgaaaaagttctcattttcacatttttatgggtaatgatagtcagcaatctttattaaatgaaatggaaaactggccaacgtattatccatatcagttgagtagcgaagaagtggtcgaggaaatgatgtctcattgagtattctcatgataacgcctcgatgccgctttagtaagttatcataactgccactggtccatccacaaacgccactgaacgcaagctagctacagacacgctcatcactatgacgtgtctgtatattaataagctaacccgcattgagttaaccaataacggattccatacacaatacggccaacagagaaagatacctgtgctcacgccattgcttatattggctggttacaatatgcactatcaattttttaaataacaaattattaaaaccacatctgtataaggaatttttaaggttcgtgggatagcttgactgtgaaaatcacaggagctacaaaaatgaaccgattcagtaaaactcaaatttatttacattggataacgctgcttttcgttgcaataacctatgccgcgatggaactccgtggctggtttcctaaaggtagtagtacttatctgctgatgcgagaaacacattacaatgcgggtatattcgtttgggtgttaatgtttagtcgcctgattataaaacaccgttatagtgatccttctattgtgccaccgccacctgcctggcaaatgaaagcggctagcctaatgcacatcatgctttatataaccttccttgcacttcctctgctggggattgctttgatggcttacagtggaaaaagctggagtttccttggtttcaatgtgtctccctttgttaccccaaacagcgaaattaaagcactgataaaaaatattcacgaaacctgggcaaatataggctactttttaatcgcagctcacgctggcgcagcactctttcatcactacattcagaaagataatactctgttacgaatgatgcctcgccgcaaataagtcgatccccttacaaggaaatgtgaaccatggacatcaacgcgtcataaatgtttacgcaagtgcacaatgcaccctttccactatcaacaaggaggagcagaaactgtgtaaatcgtacaatggtaagacttatcaaaaatacaggttaattttggtatttaaaccttttttacttgttagtatgatacaaaggctttcaaaaaagctgcgaaattcaacaactcttggaaattatggactttgtcccgcggctttaatctgacggccgcgttccttttttgactcaattattgaacccttctctacgcaacttcagttcccaccaccaactttgcggcagtttcataggatgaatgtctaaaagaataatggtgagcgataagaaaacgactgaataactgcacattttcgctcgaaagcttcctgtcagatccatagcgaatcaagtgctgaatgtcacagtatcgaacagaaaacagtgacgatctaacccttcaagaatattctacgattgttctgtttaggaaaagcaaggcgggaagtcgggagataagtcattgataaaggttcagatggttgccatgatgccaggaaatttggcattttaacagtccctgtccgtgcaattttgttcaagtgacgagtttgcgagcaaaacgatgattaagtggccctggaaagtacaagaaagtgcacatcaaactgcccttccctggcaggaagcactaagcatcccccttttaacgtgtctgacggaacaggaacaaagcaaattagtcactcttgccgaacgttttttacagcaaaagcggcttgttcctttacagggctttgaactggatagtttaagaagctgccggatagcacttctattttgcctacccgttctggagttaggactggaatggctggatggttttcatgaagtcttaatttatcctgcgccatttgtggtcgatgatgaatgggaagacgatatcggtctggtgcataaccaacgtattgttcagagtggtcagagctggcagcaagggcctatcgttttgaactggttggatatacaagattcttttgatgcttctggttttaacctgattattcatgaagtcgctcataagctggacacccgtaacggcgatcgcgccagcggagttccctttattccgttgcgtgaggttgctggctgggaacacgatcttcatgctgcaatgaacaacattcaggaagaaatcgaattggttggcgagaatgcggcgagcattgatgcttatgcagccagcgatcctgctgaatgttttgccgtactttctgaatatttctttagcgccccagaactttttgctcctcgtttccctagtttgtggcaacgtttctgccaattttatcaacaagatcctttgcagagactgcatcacgctaatgatacagacagctttagcgcgacgaatgttcattaattaacaactttgcagattaattaaccaattgaaatgacttatgaaatttagtgttgacagacaaggtaccgctaagtaatattcgccccgttcacacgattcctctgtagttcagtcggtagaacggcggactgttaatccgtatgtcactggttcgagtccagtcagaggagccaaattctaaaaattcgcttttttagcgcaatgtcactgaccttagttgaacattgttttttaacggatagcgggtttttaacatcttaagcgccctcgacctttatggttgagggcgttttgctatgaacgccatcaccattttcccctcgattataaaacttgagttattcagtagtctcccctcttgcaactcacacccaaaactgcctaacgaaaagttattaattttcaatcatattgctatcagtatttacattttttcgctgtgctagaaagggcgcatttatgttagctcgtagtgggaaggtaagcatggctacgaagaagagaagtggagaagaaataaatgaccgacaaatattatgcgggatgggaattaaactacgccgcttaactgcgggtatctgtctgataactcaacttgcgttccctatggctgcggcagcacaaggtgtggtaaacgccgcaacccaacaaccagttcctgcacaaattgccattgcaaatgccaatacggtgccctacacccttggagcgttggaaagcgcccaaagcgttgccgaacgtttcggtattagcgtggctgagttacgcaaactcaaccagtttcgtacgtttgctcgaggttttgataatgtccgccagggtgatgaactggatgtcccggcacaagttagtgaaaaaaaattaaccccgccgccgggtaatagcagtgacaacctcgagcaacagatagccagtactagtcagcaaatcgggtctctgctcgccgaagatatgaacagcgagcaagcggcaaatatggcgcgtggatgggcctcttctcaggctagtggcgcaatgacagactggttaagccgcttcggtaccgcaagaatcacgctgggcgtggatgaagattttagcctgaagaactcccagttcgattttctccatccgtggtatgaaacgcctgataatctctttttcagtcagcatactctccatcgtactgacgagcgtacgcagattaacaacggcttaggttggcgtcatttcactcccacatggatgagcggcatcaacttctttttcgaccacgatcttagccgttaccactcccgcgccggcattggcgcggagtactggcgcgactatctaaaattaagcagtaacggctatttgcgactgaccaactggcgcagcgcacctgaactggacaacgattatgaagcacgcccggccaatggctgggatgtacgcgcagaaagctggctacccgcctggccgcaccttggcggtaaactggtctatgaacagtattatggcgatgaagtggccctgttcgataaagacgatcggcaaagtaatcctcatgccataaccgctggacttaactatacccccttcccgctgatgaccttcagcgcggagcaacgccagggtaaacagggcgaaaatgacacccgttttgccgtcgattttacctggcaacctggcagcgcaatgcagaaacagcttgacccgaatgaagtcgctgcacggcgtagccttgcaggcagccgttatgatctggtggatcgcaacaacaatatcgttctggaatatcgcaaaaaagaactggttcgcctgaccctgacagaccccgtgacagggaagagtggagaagtgaaaagtctggttagcagcctacaaaccaaatatgccctgaaaggctataacgtcgaagccaccgcactggaagctgccggtggcaaagtggtcacaacgggtaaagatattctggttaccctgccggcttaccggttcaccagtacgccagaaaccgataacacctggccgattgaagtcaccgccgaagatgtcaaaggcaatttgagcaatcgtgaacagagcatggtggtcgttcaggcacctacgctaagccagaaagattccagcgtaagcttaagtacccaaacattgaacgcggattcccatagtaccgccacactgacttttattgcgcatgatgcagcaggtaatcctgttgtcgggctggtgctcagcacgcgtcacgaaggtgttcaggacatcaccctttctgactggaaagataatggtgacggaagctatacccagatcctgaccacaggagcgatgtctggcacgctgacgctgatgccacagctgaatggtgtggatgcggctaaagcccccgccgtggtgaatatcatttctgttagcagttcccgaactcacagcagtattaagattgataaggaccgttatctctccggcaatcctatcgaggtgacggtagaactgagagatgaaaatgacaaacctgttaaggaacaaaaacagcaactgaataacgcagtcagcatcgacaacgtgaaaccaggagtcactacagactggaaagaaaccgcagatggcgtctataaggcgacctataccgcctataccaaaggcagtggacttactgcgaagctattaatgcaaaactggaatgaagatttgcataccgctggatttatcatcgacgccaacccgcagagtgcgaaaattgcgacattatctgccagcaataatggtgtgctcgccaatgagaatgcagcaaacaccgtcagcgtcaatgtcgctgatgaaggaagcaacccaatcaatgatcataccgtcacgtttgcggtattaagcggaagcgcaacttccttcaacaatcaaaacaccgcaaaaacggatgttaatggtctggcgacttttgatctgaaaagtagtaagcaggaagacaacacggttgaagtcacccttgaaaatggcgtgaaacaaacgttaatcgtcagttttgtcggcgacagcagtactgcgcaggttgatctgcagaagagcaaaaatgaagtggttgctgacggcaatgacagcgtcacaatgaccgcgaccgtccgggatgcaaaaggcaacctgctcaatgacgtcatggtcactttcaatgttaatagtgcagaggcgaaactgagccaaaccgaagtgaatagccacgacgggatcgccacagctacgctgaccagtttgaaaaatggtgattatagggttacggcctctgtgagctctggttcccaggctaatcaacaggtgaattttatcggtgatcaaagtactgctgccctgaccctcagtgtgcctagtggtgatatcaccgtcaccaacacagctccgcaatatatgactgcaaccttgcaggataaaaatggcaacccactaaaagataaagaaatcaccttctctgtgccaaacgacgtcgcaagtaagttcagcattagcaacggaggaaaaggcatgacggatagtaacggggttgcaatcgcctccctgaccggcacgttagcgggcacgcatatgatcatggctcgtctggctaacagcaatgtcagcgatgcacagccaatgacgtttgtggcggataaagacagagcggttgtcgttttgcaaacaagcaaagcggaaatcattgggaatggcgtggatgagacaactctgacagcaacagtgaaagatccgagcaatcatccggtggcggggataacggtaaacttcaccatgccacaggacgttgcggcaaactttacccttgaaaataacggtattgccatcactcaggccaatggggaagcgcatgtcacgctgaaaggtaaaaaagcgggcacgcatacggttaccgcaacgctgggtaataacaataccagtgatagccagccggtaacatttgtggcggacaaagccagcgctcaggttgtcctgcagataagtaaagatgagatcacaggtaatggcgtcgatagcgcaacgctaactgcaacggttaaagatcagttcgacaatgaggtgaataatcttccggtaacattcagcagtgcctctagtggactcaccctgaccccgggagtaagtaataccaacgagtctggcatcgcgcaggccactctcgcaggcgttgcctttggtgagaagacggttactgcaagtctggctaataatggtgccagcgacaacaaaactgtgcattttattggcgacacagcggcggcaaaaattatcgagttggcgcctgtcccagacagcataatcgccggtaccccgcagaacagctccggcagcgtcatcaccgccacagtcgttgataataatggctttccggtgaaaggtgtgactgtgaacttcaccagcaacgcagcgacagccgaaatgacgaacggcggtcaagccgtgacgaacgaacagggtaaggctaccgtcacttataccaatacccgctccagcatagaaagtggagcgagaccggataccgttgaggccagtctggaaaatggtagctccacgcttagcacaagtattaatgtcaacgctgatgcgtctacggcacatctcaccttgctacaggcactttttgatacagtctccgcaggcgagacaaccagtctgtatattgaggtgaaggataattacggcaacggtgtcccccagcaggaggtaaccctcagcgttagtccaagtgaaggcgtgacccccagtaataacgctatatatactaccaaccacgacggcaatttttacgcaagctttaccgctacaaaagccggggtttatcaattgacggcaaccctcgaaaatggcgatagcatgcaacaaacagtgacctatgtgccgaacgtcgcgaatgctgaaatcacgctggcagccagcaaggatccggtgattgccgacaataacgatctcacgacactaacagcaacagtcgctgatacagagggcaatgcgatagccaacactgaggtaacatttactctgccggaagatgtgaaggcgaacttcacgctgagcgatggcggtaaagtgattactgatgctgaaggcaaagcgaaagtcacgctgaaaggtacaaaagcaggcgctcatactgttacagcaagcatgactggcggtaagagtgagcagttggtggtgaactttattgcggatacgctcactgcgcaggttaatcttaacgttaccgaggacaattttatcgctaataacgtcgggatgaccaggctgcaggcaacagtgactgatggaaacggcaacccgttagccaatgaggcggtgacattcacgctaccggcagatgtgagcgcaagctttactctcggacaaggcggttccgccattactgatatcaacggcaaggctgaagttacactgagcggtacaaaatccggcacctaccccgtgacagttagcgtgaacaattatggtgtcagtgatacgaaacaggtgactttgattgccgatgctggtaccgcaaaactagcctccttaacctctgtatacagtttcgtcgtcagcacgaccgagggcgcaaccatgacggcaagcgtcactgacgctaacggcaacccggtagaaggcataaaagttaatttccgcggaacctccgtcacgctaagcagcaccagcgttgaaacggatgatcggggtttcgctgaaattcttgtgacaagcaccgaggtcggactgaaaacagttagtgcctctctggcagataaacctactgaagtcatcagccgattactgaatgccagtgcagatgttaattctgcgacgattaccagtctggagataccggaaggtcaggtaatggtcgcacaagacgtagcagttaaagctcacgttaacgaccagtttggcaacccggttgcgcatcaacccgtgacattcagtgcagagccatccagccaaatgatcatcagccagaatacggtctctactaatacgcagggtgtagccgaggtcaccatgacgcccgaaagaaacggtagctatatggtgaaagcatccctgccgaatggagccagtcttgagaaacaactggaggctattgatgaaaaactgacactcacggcgtccagtccgcttatcggtgtctatgcccctacaggcgctactctgacggcaacgctaacctctgcaaatggcactccagtggagggtcaggtcatcaactttagcgtaacgccagaaggggcgacgttaagtggcggaaaagtgagaactaactctagtggtcaggctccagtcgttttgaccagcaataaagtcggtacatatacggtgactgcatctttccataacggcgtaacaatacagacacagacaaccgtgaaagtcactggcaacagtagcaccgcccatgttgctagctttatcgctgatccaagcactatcgccgccaccaacactgatttaagtaccttaaaggcaacggttgaggatggcagtggtaacctgatcgaaggtctcactgtgtacttcgccttaaaaagcggctctgccacattaacgagtttaacagcggtgaccgatcaaaacggaatcgcgacaacaagcgtgaaaggagcgatgacaggtagcgtcacggtaagcgcagtcacgaccgctggtggaatgcaaacagtagatataacgctggtggctggcccggcagacaccagccagtccgtccttaagagcaatcggagtagtctgaaaggggactataccgatagtgctgaattacgtcttgttctgcacgatataagtggcaatccgatcaaagtttctgaagggatggaatttgtgcaaagtggtactaacgtgccctatataaaaattagcgcaattgattacagtctaaatatcaacggtgattacaaagccactgttacaggaggcggagagggtatcgcaacgctgatccctgtattgaatggtgttcatcaagctggtctgagtaccacaatacaattcactcgcgcagaagacaaaataatgagcggtacagtaagtgtcaatggtactgacctaccgacaactacattccctagccaggggttcaccggggcgtattatcagttgaataatgacaactttgccccaggaaaaacggcggctgattatgagtttagtagctctgcctcctgggtcgatgttgatgctaccggtaaagtgacatttaaaaatgtcggcagcaatagcgaaaggattacggcgacgccaaaaagtggaggccctagctatgtatacgaaatccgtgtgaagagttggtgggtgaacgccggcgaggctttcatgatatacagccttgctgaaaatttttgcagcagcaatggctacacgctccccagagcaaactatttaaaccactgtagttcccgaggcatcgggagtctgtacagtgaatggggagatatggggcattacacgactgacgctggttttcaaagtaatatgtattggagttctagtcccgcaaacagtagcgaacaatacgtagtttccctggcaacaggtgatcaaagcgtatttgaaaagcttgggtttgcttatgcgacatgttataaaaacctgtgattttccgttataatttcttaaagagtgttccattcggggcactcttttttacattccctctacagaactagcccttctctcacagaaaatgaataaataaaaatgcggcaccgccagaatcgcgttcgatgtgactatgatcattttcggtgagtactgctttgatctaaaggctggttttctgtgatgattgaccagcctcagagtattgatgacaccaccgttcataacagatcggcattactatgcataagtactgtctcatattctcgccaaaacactttttaatgcctttgcgaattcatccagacttatattgtcaattttttgcccaacgacgactgactccgagacatcggccattgcgggccatcgcgttttgtaatcagcataaattgcaacaacaggggtattataggcacttgccatatgtaatattgaggtgtcaggagttattgcgatataagcatcttttatgattgctgctgaacgtttaatcgagggtggtaaggataaacggtagacattattataacaatccactaatgccctggctttatcttcacctttgggtccatgaacgatcactattggtatatctgtttcactttaaatttttgctattagattttctgcaatcgataatgaaaatgtacgttcctgcgagctaccttctaaattgaacgcaatgtaagatcctaacgatcgcatttcctcgcgcacctcatcgagtacatcctcacttagtggcaattcatatattggcctgactgctggaaaacccgcctcacgcatcataaatgcccatgtcataggtacgggagcccggagtttctgatccatactggacgcgttcttgcacaaaggggagaagcaattcatggttataccaacaacctgaaaattcgtttttgctttcaactgactgataaataacatcgttttcaggttctttttacgcatcccctcaatgcaaagatccggcgtaccgtattgctgtgttatgttctttgctaaatcttttatttcttttaatgttgcgtgatcctgcatagtcattgtgactaatgttaatttagtctgttcaagtttaagcgcattaaagacttctaaattaattgtcgacgttacaattaaaagatgcttaattttatgcaattcaagcgcccgaataacaggaaagatggccatagcatcgccaatctgatcgggaatatggatgacaacaaagtctgttttttcaatattgaaattataagctttataatcgtagtaactaaatgcaatacgtctcaacaatgatgctaaaaacatacctaacctcgcctccctactggttataatgcaatgcagtctatcagactcatcagggtgccattttgtgcatatgcggacttttatgtttcatatctctaacctgtgggtcctctgcttaatccttaaacaacaccagcaactcctgcgctttcatcttccatcgaatttttcatgttgccgctaatcagccataaaatcatttgcagatgcgctctgtcgaggtagtctcataaggttcgtttatagatcgacggcaatgtgagttaccttttccatactaattataaaaagacagtacaaacaggatcattatggactccacgctcatctccactcgtcccgatgaagggacgcttagcttaagtcgcgcccgacgagctgcgttaggcagcttcgctggtgccgtcgtcgactggtatgattttttactctatggcatcaccgccgcactggtgtttaatcgcgagtttttcccgcaagtaagcccggcgatgggaacgctcgccgcatttgctacctttggcgtcggatttcttttccgtccgctcggcggtgtcattttcggtcactttggcgaccgactgggacgtaagcgcatgttaatgctgaccgtctggatgatgggcatcgcgacagccttgattggtattcttcctagtttcagcaccattgggtggtgggcacctattttgctggtgacactgcgtgccattcagggatttgcagtcggcggcgaatggggaggcgcggcgttgctttccgttgaaagtgcaccgaaaaataaaaaagccttttacagtagcggtgtacaagttggctacggtgtaggtttactgcttagtaccggactggttagtttgatcagtatgatgacgactgacgaacagtttttaagctggggctggcgcattcctttcctgtttagcatcgtactggtactgggagcattgtgggtgcgcaatggcatggaggagtccgcggaatttgaacaacagcaacattatcaagctgccgcgaaaaaacgcatcccggttatcgaagcgctgttacgacatcccggtgctttcctgaagattattgcgctacgactgtgcgaattgctgacgatgtacatcgttactgcctttgcacttaattatagtacccagaatatggggctaccgcgcgaacttttccttaatattggtttgctggtaggtggattaagctgcctgacaattccctgttttgcctggcttgccgatcgttttggtcgccgtagggtttatatcacaggtacgttaatcggaacgttgagcgcatttcctttctttatggcgcttgaagcacaatctattttctggatagttttcttctccataatgctggcaaacattgcgcatgacatggtggtgtgtgtgcaacaaccgatgtttaccgaaatgtttggtgccagttatcgctatagtggcgctggagtcggttatcaggttgccagtgtggttggcggtggatttacaccttttattgccgctgcactcatcacttactttgccgggaactggcatagcgtcgccatttatttgctggctggatgcctgatttccgcaatgaccgctttgttgatgaaagacagtcaacgcgcttgatagcctggcgaagatcatccgatcttcgccttacacttttgtttcacatttctgtgacatactatcggatgtgcggtaattgtatggaacaggagacacacatgaataataagggctccggtctgaccccagctcaggcactggataaactcgacgcgctgtatgagcaatctgtagtcgcattacgcaacgccattggcaactatattacaagtggcgaattacctgatgaaaacgcccgcaaacaaggtctttttgtctatccaagtctgaccgtaacctgggacggtagcacaaccaatccccccaaaacgcgcgcatttggtcgctttacccacgcaggcagctacaccaccacgattactcgccctactctctttcgtagctatcttaatgaacaacttacgttgctgtatcaggattatggtgcgcatatcagtgtgcaacccagccagcatgaaatcccttatccttatgtcatcgatggctctgaattgacacttgatcgcagtatgagcgctgggttaactcgctacttcccgacaacagaactggcgcaaattggcgatgaaactgcagacggcatttatcatccaactgaattctccccgctaagccattttgatgcgcgccgcgtcgatttttccctcgcacggttgcgccattataccggtacgccagttgaacattttcagccgttcgtcttgtttaccaactacacacgttatgtggatgaattcgttcgttggggatgcagccagatcctcgatcctgatagtccctacattgccctttcttgtgctggcgggaactggatcaccgccgaaaccgaagcgccagaagaagccatttccgaccttgcatggaaaaaacatcagatgccagcatggcatttaattaccgccgatggtcagggtattactctggtgaatattggcgtgggaccgagtaatgctaaaaccatctgcgatcatctggcagtgctacgcccggatgtctggttgatgattggtcactgtggcggattacgtgaaagtcaggccattggcgattatgtacttgcacacgcttatttacgcgatgaccacgttcttgatgcggttctgccgcccgatattcctattccgagcattgctgaagtgcaacgtgcgctttatgacgccaccaagctggtgagcggcaggcccggtgaggaagtcaaacagcggctacgtactggtactgtggtaaccacagatgacaggaactgggaattacgttacagtgcttctgcacttcgttttaacttaagccgggccgtagcaattgatatggaaagtgcaaccattgccgcgcaaggatatcgtttccgcgtgccatacgggacactactgtgtgttagtgataaaccgttgcatggcgagattaaacttcccggccaggctaaccgtttttatgaaggcgctatttccgaacatctgcaaattggcattcgggcgatcgatttgctgcgcgcagaaggcgaccgactgcatagccgtaaattacgaacctttaatgagccgccgttccgataataagttctgaaccttcttatcagaaatagatgtgaaggagtaagtaagacacctggcaaatagcctgcaataatcgtgggctgtttgcttccttgggcggatacgagttttattatcgtcttaatgatttccacatattaaaagcaagtatgctttcaaaacacaattataaaaaatcccgccaacaatataagtttttataaaattaaatataagattatggctttagaatatttttatttctaatagacgagatttttcctgttatgatataatatgctgaattaacacatgttaacgatttaccagtaatgtaaataaattttcgaggagatcattccagtgggacgtaaatgggccaatattgttgctaaaaaaacggctaaagacggtgcaacgtctaaaatttatgcaaaattcggtgtagaaatctatgctgctgctaaacaaggtgaacccgatccagaattaaacacatctttaaaattcgttattgaacgtgcaaagcaggcacaagttccaaagcacgttattgataaagcaattgataaagccaaaggcggcggagatgaaacgttcgtgcagggacgttatgaaggctttggtcctaatggcagtatgattatcgccgagacattgactagtaatgttaaccgtacgattgctaacgttcgcacaattttcaataaaaaaggcggcaatatcggagcggcaggttctgtcagctatatgtttgacaatacgggtgtgattgtatttaaagggacagaccctgaccatatttttgaaattttacttgaagctgaagttgatgttcgtgatgtgactgaagaagaaggtaacattgttatttatactgaacctactgaccttcataaaggaatcgcggctctaaaagcagctggaatcactgagttcagtacaacagaattagaaatgattgctcaatctgaagttgagctttccccagaagatttagaaatctttgaagggcttgttgatgcccttgaagatgacgacgatgtacaaaaagtttatcataacgtcgcaaatctctaattatcttttaaagaaatctgtctttacggcagatttctttaatctcatataattcttataaaaaatataatattcaactcgtcatattgattatacccccccgttcccagagaaataatatttattaaaattccagttcttctttttctgattacagaaggcaaagtggcaattacgcatagtttcccgataaagacgcgatagcgacatcccgcataaggcatttttctctttatctttgtacggtacttcatggaacagagtttttgaccttgcgaatcgtgatgtctgttggggagggacaatttgctcactgaagcgtgagactcgattaagcgcacgaaacacagaaatcaaaaaacccggtcacttttttacaaggtaaccgggtaaaaataatttttattttttaactgttttgagactcatagagatgtctcaaaactaaaatttggctcctctgactggactcgaaccagtgacatacggattaacagtccgccgttctaccgactgaactacagaggaatcgtgagaacgaggcgaatattagcgatgcccacccacaatgtcaaagcctgttttttaaatttgaaatcgtttgctgaaataatctgcattttgtcgtttattcgctcacaactggctttttttcacacttttgcggctcgggtcgagggtatttccatagccaacgtccagtaaccattcgccagtaaaacagcacggcccgcacagcccagtcggcaaacattcccatccagacaccaaccacaccccagccaagcatgattcccagcacataaccgactacaacccgacaaccccacatgctcaacatgctaacccacatggcgtaacgggcatcacgagcacctttaaatccagcgggtagcacccaactggcggaccaaataggcataaataaagcatttagccaaatcagaatcacaacgacatgtttaacctgtggatcctgggtgtaaaagcttgccataaccccggcaaagggagccgttagccaggcgatggccgttaatccaagagtggaaagccagaacacatgccgcaactgaatctctgcttgcgctatctgccctacccccaaccttcggcctgtaatgatcgtagaagcagagccgagcgcacttccgggtaagttgataagagccgcaatactaaacgcgataaaatttccggcaataacactggtccccatcccggcaacgaacatttgggttaataaccgaccactggtaaataacacactttcgacactcgcgggaataccaatccccatgacttcccagataatgctaaaattcagcggtttaaaatagctctttaagctaatccttagcgcaggattaaaaccaatcgccagcacccacaaaattgcaactgcgccaatataacgagaaatggttaaacccagccctgccccgacaaatcccagtcccggccaggagaaaaggccgtaaatcaatatgccgctaataataatattaagaatattcaggctaccgttaatcaatagcggtattttcgtattccctgcaccacgaagtgccccgctaccaataagagtgatggcagctgctggataactgagtaccgtcagctccagataagtcaacgccagtgctttaacttctgtcgtggcatcacccgcgacgaaatcaataatttgttcgccaaaatgatgaataagcgttgccaacagtacggcaaacaacgtcatgatcaccaaactctgccgcgtcgccaccctcgctcgtcgtcgatcccgcttaccgagactaaatgccacaacgacagtagtaccaagatcgatagcagcaaaaaaagccataatgaccatattgaagctgtccgccaatcccacgccggccatcgcatcttttcccagccagctgaccagaaaagtgctcagaacccccatcaacaggacacaggcattctccatgaagataggaacagcaagcggggttatctcgcgccagaacaacactttgtagctcttgcgtttagcgtgccagcgagtgccgtgaacaacctggcgtaaagcagaggagatattcaaagcgctccttaattgcagaaagtgaaaccacatttcaaataaactgggagaatcagcaaagctgcaaagattttcgccaacaaattgtctgcaaatgcaacaaactgtacttagaaacggcaaacagttggggaatttaaaaatcgggttactcaaaagatttttcgccgttaagatgtgcctcaacaacgattcctctgtagttcagtcggtagaacggcggactgttaatccgtatgtcactggttcgagtccagtcagaggagccaaattcctgaaaagcccgcttttatagcgggatttttgttatatctgataatcaatttcctcttcactgctttccatcacctgccgcttgatatcctcaacactcagtcctgcattacaaagttccagaaagcgccagacatagttacgctgaagttgtcctcgcttcagtcccaaccagacagtattagcatcaaaaagatgccgcgtatccaggcggattaaattctcttcctcttgttcgccactggattgctcggcaactaatccgatcccaagcccaagagcaacataggttttaatgacatcagaatcctgcgcacttaatacaatatctgccagcaaacctttgcgggcaaatgcgtcatcaatacgactgcgccccgtaatcccctgtcggtaagtgattaacggccacttcgctatactttccagcgtcaatggactaatttgcgtcaagggatgatcgtgtggaacaagcaaactatggtgccaacgaaaccacgggaaggcgacgagctgcgggtcattactcaaacgctcgctggcgataccaatatcagcttcgccattttgcaacaatgtcgcaatttcctgtggcgtcccctggattagctcgagccgaacctccgggaaaagttcgcgaaaagctttaatgacctctggcaagctataacgtgcctgagtatgcgtcgttgcaatagtgagaacgccagacgtatcgttggtaaacaggtctgcaagccgacgaacattactggcttcattcagaatacgttctgcaatgaccagtaatgctttgcccggttcagtcatgcccagcagtcgcttacctcgtcgaacaaatatttcgatgccaagttcatcctccagttcccgaatatgacggctgacgccactctgactggtaaaaagcatattcgcaacctctgtcaggttgtaatcctgacgtgcagcctcgcggattatctttagttgttggaaattcacggtaaactccgggcagttcagatttcccgttattgttaaagtctaatgcccggcataacaaataataaaaacccgcatcttattccatcccgatataacacttagctcaccaattgccactgccttttttccatcactggagaactaatcacactcattaacaactctttcactgcctgtgcctgtgggcttaagttcgctctggcgggtaaatttaaactcaaagagagactcatggaaggagtggtaatgcgactcatccacccatttactgcgccacataagctacgcgcggcgctttcgggtaatactgcaacgcccatgccgctggcaatcgctgcggtaagcgtggcaatagactcaatttcaccaataacttttgccgtgagtcgccgtagggaaaaagcctcatcaacacgaagtctaatagcactgtaatcactggggagaaagaggttcatttgcgcaatagcattcacatcaacgctttgccccgggcaatcttgagttcctaccagaaaaagatcttctttcagcaaagcctgactggatacaccagccacaggggaatgctcataaatcaccgccatatcgagttggtgatttatcaatttttcgttaagcactgcaccactattttcatgaagatagataacgatctccggaaattcagcgcgaaccgcctgtaataagggcatggtgatggaactcgcagcggttcctggtgcaaagccaatgctgacttgcccgcttaatgcctgaccaacgttatgcaccgccagttgggcctgttcacactgacgtaaaatggcccgcgcatgggtatagagaatttttccggcgtctgttggtgtaacgccccgctttgtacggatcaaaagttgttgatttaactcaccttccagtgtggcaacctgctggctgagcgctggttgtgcgatatgcaatacttcagcagcctgggtcaggctaccaatatctacaatttttacgaagtatttcaggcgtctgaagttcatgttgcctccggtttttaagaatcggcccaagtgccgccattacttacaaccagattgcaagatgcttgccagttttattttggtgttgatgtacaagctaaccaactgtcaaataagagattatgatagattcgtcatttgctcctttaatcagctgtcgcgttcccctgccctataaaaggagggtatgcaccacgatggttcattacccaataagattgaaagctcaccactttgttgaaattgacagcaaacaaacaaaaaaatgcatttcaccctttgacatcaccatgcactgccattaatatgcgccccgttcacacgattcctctgtagttcagtcggtagaacggcggactgttaatccgtatgtcactggttcgagtccagtcagaggagccaaattcaaaaaagcctgctttctagcaggctttttgctttctaattaccaacgctcttaaaacatctgtctactaccagaactaatttgcacaggcattccgcttcgacgttgcaacgcagcatttgcgcgatttacatcaacttcttgcccgttgataaacgcccgcaaagatggggttaccggcaatggcacttttcggtcagactcatattctgcacgattgcggctcaatggctcatgaacttccagccagttgctgccatctggttcagtggtgtattttactggctggtcgataatttgcacacgcgtcccaacaggaacattatcaaacagatatttgatatcgtcattgcgcagacgaatacagccctgacttacccggagcccaataccaaaattggcattggtaccatggatggcatacaacctgccaatataaatcgcgtacagccccatgggattatcggggcccgcaggaacaaatgcgggcaaactctcccctcgtttcgcatattcgcgccgagtgttcggcgttggcgtccaggttggagcttcttgtttacgttcaacggtagtcacccagttacgcggggtttctcgcccagcctggccgataccaataggaaagacttccacagtattactgtctggtgggtagtaataaagacgcatctcagcgacgttaacaacaatccctttacgaacagtgtcgggcaaaatcagttgctgcggaatggtgagttggctgccagacttcggcaaaaaaacatcagcgcccgggttcgcttccagcatgttacttaacccttgcccgtattgtgcggcaaaagtctccagcggctgggtattgtgatcaggaacagttacagtaaagctctgccccactaaacggctaccctctggaggtaatggataagttaccgccaggctagtatggctggcaaaaagcagagcaaaactgcaaagaatatttacacgacgcatcatgtccctttcctatgtcgcgaaagctatccgttaagtatagcttttatcagacttttcgtttttaactgttcaaatcagaagtcgtattccccggtagaacaatattactggcagcaagttcgcccatgttgttgtatatcgcacaggcagcttcgatgatgggcatcgccagagctgcgccactcccctcacctaaacgcatctccatattgagataaggctccagccccaaatggctgagcgctatacgcgcgcctttttctgcgctcaggtgagaaggaatgagatacggtttgatcgcaggagacatctggcaggctgcgagcgcagcagcataagaaagaaatccatccagcaacacgggtaaaccgcaggaagcagcacctaacatcactccagctattccgaccaaatcaaatccacccacttttgccaggacatcaacaccatcctgaggatttggttgattcaacgtaatcgcccgacgcacaacatcaattttattagccagtttatctgtcggcaggtttgcgccaatcccaaccacttcttcaggatcccggccagtgattgtgctgactattgctgctgccggtgtcgtgtttgccatccccagttcacctacaccaaacagcgtgacaccgttttttgccagctcctgcgtataacatatgacgtccaaaagcaacttttcagcctgacggcgactcattgccggagcactagcaatattgccgctacctcgtgcgacacgcatgttgataagcccggggataggctcagcagtatcaataccaacatcaattacgtggacgttagcgcccgcttgttctgccagcacacacacgccggttgttccacgggtcatattttcagcctgtatggctgtcacttcttttggagaaatagcgaccccttcctcccagacgccgtgatcggcacacataaccagtaccgcttttttgcccacatgcggtatgccattcaaccccggcattcctgccagttgtatggcaagcacctccagctttcccaggctaccaacaggtttgagtaacccgtcaatatgccgttgtgcacggctcatagcggtagaatcgatggctgggatcgtattcagtaaatcggcaagtatttgcatctcacgtctctttatagcagtgccagcaggaagaccagttcaccaagctctatggctgctcccagcgtatcgcccgtttgcccgcccagcgtacgtttgagaagctgaccgaggatgaaaatcgccaccatcgtcaccaccatagcagccacaccatgcatacccggcaataatacggcagcaaaaatagcggctaagccgagtgtgacgcaggtttgtcgcccatcaattttgccaatgaacacattgccaagcccttcttcccgcgcataacgatgacgatacatcaataatgcggcagtcccgcggctgaccgcacatgctgccgccaggcttgcaaggatgctttcgccacgcagagccaactcgcttaacaccagaatctttgccagtaccacaaaaatcaatgccagaccgccgtgggtgcctaaacggctatcacgcatgatttccaacatgcgatcgcggctacgtgcagaaaatacgccatcacaggtatcagcgaggccgtccagatggaatcccccggtcatcagcaccagcacaagtacgctaaacagtgccgccagtggtgcgccacaccatgcctgcagcaccatgaagaccagcccgctaatcgcgccaagcaataatccaatcaaaggaaaagtaataataccgcgagaataatgctcgaaatccagtccctgggaccagcgacgcggtacaggcagacgcgtaataaaactgagcatcgcccaaaataatttactcatttgatttttactccaataccgctaaccaccagccatacttcatttgccgcagcggccaactgctgatttacccgcccggcaatatcacgaaaatgtcgtgccagacgactctccggcacaatccccattcccacttcgttagtcactaatacaacctttgcggggcaacgttggcaggcagcaatcaagctctgaatctcagcattaatcgcctgttccatcgcctgataatcccattcatcagggtctttatcgccgccataatcaaacaacagattagtcaccattgtggtaacgcattcaagcaacacaacctcattcgggttaatgtctgcatgaattaattcatcaagatgttgccagcgctccactgtgcgccagtgctccgggcggccttgccgatgatgttctatccgtgcagccatctcatcatcaaggatttggctggtagcgatatacagaacctgactagagtccccaataagcgcctctgcgtggcgactcttcccgctccgtgcgccccccgtcaccaaaatcatcataccgactcctgattcaaatgtatgatggtattcattgaacagaacaatggatcccccaccgttgctgaccgcaaaacatttacgcgattaatactgcgcgtaatataattaaaaatccagcattctcaatccattacgaaataagatggcattacggaatagccagactttctcgtgttaacgtccgacaaaatgcgtcattgacagcggtttctgtggattgacacatttcattcagataatgaattaatgctactgccggaacaaccagcaaacgggcattgtgttctgaaatccaggctattgattcaacgtcagcgacagatctgcgctgtaaaagaacttgtaaaacaacgtaatagaattatccggaatggtggcgactatgcactagggaaggtgcgaataagtggggaaattcttctcggctgactcagtcatttcatttcttcatgtttgagccgattttttctcccgtaaatgccttgaatcagcctatttagaccgtttcttcgccatttaaggcgttatccccagtttgcagaaactccgtaatgagattaaaagcgctcataactcatctgtcggccagaaggcgcgcctctgaattatccgacggacaaaccgggaacagtgtaatttcccggcaggagcgaaaaaattgaaaggcgcatcttactcttttcgctttcaaaaaaaagagtggtcatcgcgttaacacaccgccctgagatgaattagtgatgttttggctgcaccgcaacatacatttcgatatcccagtacccatcttccgcgccattgttcaaataaacctcgaagcagggctttggtaacatttcataagcactgtcctgcaagagactattaaagaactgataccagggtttagcaaaatcatcaccgactacacgagctaccgccaccgcatactgaccacctgtaatttctgtcagaatgacgccctcactgttttcgggaagcgtaaagtaacccggcaccgtcacgacggtgtcgcagcgtaatttttcggcgggtgtttcatctggattgtcgtaatagacagcaacccactccttcggcacaatatttttgctatctacccacatcatcaactgctcaaagcctttctttaccgtctgttcccacgggccaacgagatggaaacctgcaacggtacgtttctcttcctgcttaatctcgtagttcatgacgcctccattgatactgtttttatatacagtatagttgcaaaattaaaaccacaaggaatgagtgttgattatgcgagcagactcgcactcctgccagtctgctgcaaaagaaaggtcaggccttatggtggaaataatcactcaggcgagaaaacatgctgccttccccgacagattccagggtaaccagcggccagtgcgccacctgtttatcacggtcgtaaagttcaatttcccctacccgctgatgggcgctaattggcgcggtgagttctttaccatcaagggtatatttggctttgatatgtggaatttcggctttcggtagcaccatccagaactcttgttccgttcccaggtcgatattttctttatcgccataccagatgcgttccgttccgacctttttcccacggtgcaaaatttgcaccgtagtaaagttttgttgcccccaacgcagtaattttcttgcctcttcctcacgaccttttgcactgtcagcccccattaccactgcaatgagacgacgctgcccatctacagcgctagcaatgagattaaacccggcaccagaagtatgacccgttttcaggccgtcaacattcatggttttatcccacaacaacccgttacggttttgctgggtgataccgttccaggtgagacttttctcactgtacatatgataaaactcgggctcgccgtggatgatagcacgagaaagcacagctaaatcataagcgctgctatgctggccaggtgcatccagaccatgcactgtttcaaaatgcgtatccttgagatgcagcttctcggcatagttgttcatcatttcaacaaactgccgttgcccaccggcaatatagtcagccagagcaacacaagcgtcatttccggaatccacaattaaaccacggcttaaatcacgtacgcttacgcgatcgccctctttcaaaaacatcagactagaaccgacaaacaccggattatctttcgcccacgcatcgcgccccacggtgacaatatcgtctggcgtaatgcgatgactatcgatagcgcgatccacgacataacccgtcatcagctttgtcaggctggcgggattgcgctgttgatgctcattacccgcggtgaggatctgaccggtggtgtaatccatcaatacccaggacccggcatgaatctctggaggctgaggactaaaaggaatgttttccgccgcaaaaccagagcttaagttaaaaacgaacaaagaagcagcaataataagacggcgtttcaacagcaaaccctcaggagtttcaaatagctgttctttttacggaaatacttatgaactggctggaataaagtgcaagaaaatgtgactaccctctcatttttatctgacatgatctgttgccactcgctgccaaattgtggcgctaaagctgattagcacggtgatatttgatactctggcagacagcagaaataacggatttaacctaatgatgaatgacggtaagcaacaatctacctttttgtttcacgattacgaaacctttggcacgcaccccgcgttagatcgccctgcacagttcgcagccattcgcaccgatagcgaattcaatgtcatcggcgaacccgaagtcttttactgcaagcccgctgatgactatttaccccagccaggagccgtattaattaccggtattaccccgcaggaagcacgggcgaaaggagaaaacgaagccgcgtttgccgcccgtattcacagcctttttaccgtaccgaagacctgtattctgggctacaacaatgtgcgtttcgacgacgaagtcacacgcaacattttttatcgtaatttctacgatccttacgcctggagctggcagcatgataacagccgctgggatttactggatgttatgcgtgcctgttatgccctgcgcccggaaggaataaactggcctgaaaatgatgacggtctaccgagctttcgccttgagcatttaaccaaagcgaatggtattgaacatagcaacgcccacgatgcgatggctgatgtgtacgccactattgcgatggcaaagctggtaaaaacgcgtcagccacgcctgtttgattatctctttacccatcgtaataaacacaaactgatggcgttgattgatgttccgcagatgaaacccctggtgcacgtttccggaatgtttggagcatggcgcggcaataccagctgggtggcaccgctggcgtggcatcctgaaaatcgcaatgccgtaattatggtggatttggcaggagacattagcccattactggaactggatagcgacacattgcgcgagcgtttatataccgcaaaaaccgatcttggcgataacgccgccgttccggttaagctggtgcatatcaataaatgtccggtgctggcccaggcgaatacgctacgcccggaagatgccgaccgactgggaattaatcgtcagcattgcctcgataacctgaaaattctgcgtgaaaatccgcaagtgcgcgaaaaagtggtggcgatattcgcggaagccgaaccgtttacgcctagtgataacgtggatgcacagctttataacggctttttcagtgacgcagatcgtgcagcaatgaaaattgtgctggaaaccgagccgcgtaatttaccggcactggatatcacttttgttgataaacggattgaaaagctgttgttcaattatcgggcacgcaacttcccggggacgctggattatgccgagcagcaacgctggctggagcaccgtcgccaggtcttcacgccagagtttttgcagggttatgctgatgaattgcagatgctggtacaacaatatgccgatgacaaagagaaagtggcgctgttaaaagcactttggcagtacgcggaagagattgtctaatttgaagcctccgccgctggtacggcggaggacaatgttgagtcaggctttttgaacggtgatgctccacgctgcatcgccaatctgctgataatcggtgatggcatgtccttcttctgccgcccactgtgggattgcttcagttgcctgggtgcaatcaaactcaatcactaactcatcgccgctgaccatttctgccagagctgcttttgcttctatgagtggaaacggacagacctgcgtcaccacatccagctttttaatcaccatctttacaccttacttaatttgccgcagcagttgccagtcgcgccttacgctgcggtcgaacatacacaagccaggacgcagtccagactccgagaatcataaatacaaggccaatccagccctgccaggtcatcattgcagtcataaccagtccattaccgatagagcaaccacctgcaatactggcaccgaagcccatcagtacaccacctaacccgctacgtaatgttgtttgtgcatcagctgcgcgaacgcggaactcacggctcgctttggctgcaataaaactccccacgaagatccctaacaccaggaaaacgccccagttaatgtatttcatgtcacccgcgaccagaaattgcagaatattggccgttggggaagtgattcctaacccaaacatgcgtccggttgcttcactcaggggccaggctaaaagcgcaatcaaaccgatgagtacagctgtgacaaagggatgccagcgtttttcaaacagaatatgagcgatcccggttcggcgcggcggtaaggtcgcgactttgagttttggcttcttcaactctttcatcaccacccagagcgttatcaccagcaaaacggcaaccaacggccacacagacaaattaaaagtctcagcaatagagttatgttcagtactgtagtgctgcaaggtttgatttaaaccactggcatgtggagaacgcatcaccgcactcatcaccatataagtgaaaagcgcgatccaactgccgatcaatccctcacccgcgcgataccaggtcccggtggcacatccacccgccagaacaattcccagcccgaagatatacccacctataacagtaccaagccacgggaacgccccggcttcgtaagtcagtaggcccgcctgaattaacgcaaaaacccccacgctttgtacgctaattgcaatcagcaaggcgtaaaacatgcgattatttttcacgatatacatatcgcgaaaaccacctgtcaggcaaaaacgcccacgctgcatgacaaatcccagcagagcaccacaaattagcccgcttaatatcatactaaacataaattaattaaccagatgaatgttaatgaggaaattattcatgactggtggaatgcagaccaataaccaaattctctaaattagaacaaatggttattaatgaggagttcgatacaaaagaataaaaaaaccggagccaaatgttcattcgactccggtttattattagaaaagatgattatgctacgtcttcgtactgcggaaccggattacggaagctcttggtgacgcaagccaggtaaatcagaccgatagcagcccagatcagacccagaaccatactgctttcttccaggttaacccacagcgcaccaacggtcagcgcaccacacatcggcaggaacagatactggaagtgatctttcagcgtcttgttacgcttctcacggatccagaactggctgatgacgctcaggttaacgaaagtgaacgccaccagcgcaccaaagttaatcagcgccgttgccattaccaggtcgaagttgattgccagcagggcaatcgcgccaaccaggatgatgttcatcgccggagtacgccatttcgggtgtacataaccgaagaagcttttcgggaatacgccgtcacgacccattacgtacatcagacgcgctacgcctgcatgcgccgccataccggacgccagtacggtaatggtggagaagatcagcgcgccaacctggaacgctttacccgcaacgtacagcatgatttcaggctgactcgcatccggatctttaaagcgagagatatccgggaagtacagctgcaggaagtaagttgcaaagatgaagatcatgccgccgatcagcgcggtcaggaaaatcgcacgcgggatcacgcgctctgcatctttggtttcttcgctcaggttgctgatgccgtcaaagccggtaaaggagaagcacaggattgtcgccccggtaatcatcgggataacatgcgcatcgccagaccagaatggacgagtgctcgccagcgtaccagcgccttcaccttcaaatacgccataaacaaccatgcccagaatcaccgcgatcagcactacctgcaacacgacgattacagtgttgaagttcgctacggatttcagactacgcaggttaaaggcggtcataaaggccaccagcgccaccacaaacatccagcttgggatggaaggcaccagagcttcaaaatagattttcgccagtagaatgttgatcatcggcgcgaacagatagtcgagcagagaagaccaacccaccataaagccgacagtcgggctaatggatttctgggcgtaagtgtatgcagagccagcagaaggatagcggcgaaccagcttcccgtagctcagagccgtaaacaggatcgcaatcaatgcgaacgcataggctgtcggcacatgaccatccgtgaggccactaacgataccaaaagtatcaaacagcgtcatcggctgcatataggcaagacccatcattacaaccggaactaacgtaagcgttttacgcaattccacgcgagaggtgtttggagtaacgttatggctcatggtcattctcctttacggtgataaccgtcgcgtaagcaaaaaattgccccatttttttggattcctcagcgacaacaactgtcgatttttagtaaatatctatccggtacgaagcccggcctcttggtatgaatgattggtttgaagcaaaaaataaccgacgctgatgaaacgtcggtttttagtcattttttgacagcggcgcattgtgcctaaatgggggggaaatgacaagagaatgagaggcttgtcagaataatttttctttaaatggcactttttccgtcatcagattttgcataaacaccggcgatcgcactatttgctaaaatttcatcccgccaccagccactggcaagtcctgcggtctgttcgttccagccaatccagacgggttcaaagagagtttgggcgaccactttcttctcgattaacgcgccactatcgagaaaacgttgcgccagataacggggtaaatagccgcagccgaggccgctaatttgcagctccagtttggttttaaaatcgaaaacggtaatggcttcttgttcgtcgagaagttgacttgccgtagaagcgcctgcctgcgcagtatcccccaccacaatcgcccgatatcgcttaataatacgacgatttaacggctcttcttccagggctaacggatgatgaggcgcgaccgcaaagacttgttccagatcgcccaaccgactaaaaccaaactcactggaagatggtggctcatgcatcgcgccaacaataatatccgctcgcccctgagtcagggcatcccaactaccaccgagtacgccattgataaacttcaggcgcgtcacgctatgatgttgataaaaagcttcaatgagtggcgcaagcagagaaaaaggaaacgtgtcgtccacgccaatcaccagctcgttttcccagccttcatgcagtttgatcgcctgcttttccagttcccgcacggtatgcagaacttcccgccctttctctaataacatttttccggtgcgggtgaatttagcgcggtgtccgctacgatcaagcaattgaatattaaggtcgctttccagcttgtgaacggtgtaactcagagcggacggcgtcttgtagagtttggcgctcgccgccgcaaaactgccttctttttctaaggcatcgaggatcatcaacacatccagcagtggtttcatacacgcccccttgcagtgcatgcggcgtcctgctggcgtgatcgtttactccagcggcattaccagcggatcgggatactggtattcaaatcccagttcattacaaatccgactgccatcaataatcttacctttgccgctgtccagactatttctgaactgcggaggttccagccccagtaaacgggccatctgcggatagaaaacattacgcgcagggtgagctggcgcacatatattatagatgtgtccgcctttaggtgcctgtaacaacagagtgatagcgccaataacatcttctaaatggactaaattaacaccatgttcaccatcaggcgcggtttttccggcaaagaagcgtccgggatgacgtcccggtccgaccaggcccgcaagacgcagaatatcgacgctagtaccgggtaaattgtgcagccagtcttcgagttcttctaatactcgtccactgttggttactggattacgcggggtggtttctttcaccgtgccttgcgcgtcgccatagacagatgtactgctggtaaaaataatgcggggaatacgatgggccagcgcgctatccactaactcttgtaccgcttgtaaatagaactcatcgccggggccgctacgacgtgccggaagcgtaatgaccagcgcatcggcatccatcagggcatccagatcgtcagaatcgcaaactagctcaggctccatgcgaagcagatagctatcaatgccactcattcgggccgcttcgacaccatcttgtgtggttttactcccggtgacttgccagcctcgcgcactaagactcatcgccagcggcatgcctaaccaccctaacccgacaattgcgacctttttcatccgttatctcctgatacaccttagatctataaggctacgctagcgtatcaaaactgacaattcattctatgaatgaatctgttcaataatgataacgacatgctgcaatgagcagactatcgtcggtaaccgcgtataccagacggtgctcctctgtaatgcgtcgggaccagaaaccactcaaattatgtttcaggggttctggcttccccttaccttcaaatggcgttctgcgggtatctttgataagttcattgatctttttaacaattcgcttatctgtttcctgccagtacagataatcgtcccaactttcctcagaccagattagtttcactcaatgatgtccttttccgttcctttgccacttttcaggctatcgatactgtccatcaatctccgggcgttagcgggggagcgcagtagataagccgtctcttccaggctgttgtattcttcgagactcatcagaacacaagcctctccattctgacgagtaataaggatcggggcatgatcttcaacggctttcatcattgttgcgctcaaattctgacgcgcttcgctgtagctaattgtacgcatgtcaatctcctcttttgtacagttcattgtacaatgatgagcgttaattaactatttattaattagtttgtagatcaaggtattgtcagtgagacgaaaatccaggcttcgctatttttggtgccatcagctaagaggacagtcctcttagccccctcctttccccgctcattcattaaacaaatccattgccataaaatatataaaaaagcccttgctttctaacgtgaaagtggtttaggttaaaagacatcagttgaataaacattcacagagacttttatgacacgcgttcaatttaaacaccaccatcatcaccatcatcctgactaatctttcaggcgatgtgtgctggaagacattcagatcttccagtggtgcatgaacgcatgagaaagcccccggaagatcaccttccgggggcttttttattgcgcggttgataacggttcagacaggtttaaagaggaataacaaaatgacagacaacactcgtttacgcatagctatgcagaaatccggccgtttaagtgatgacagtcgcgaattgctggcgcgctgtggcattaaaattaatcttcacacccagcgcctgatcgcgatggcagaaaacatgccgattgatattctgcgcgtgcgtgacgacgacattcccggtctggtaatggatggcgtggtagaccttgggattatcggcgaaaacgtgctggaagaagagctgcttaaccgccgcgcccagggtgaagatccacgctactttaccctgcgtcgtctggatttcggcggctgtcgtcttagcctggcaacgccggttgatgaagcctgggacggtccgctctccttaaacggtaaacgtatcgccacctcttatcctcacctgctcaagcgttatctcgaccagaaaggcatctcttttaaatcctgcttactgaacggttctgttgaagtcgccccgcgtgccggactggcggatgcgatttgcgatctggtttccaccggtgccacgctggaagctaacggcctgcgcgaagtcgaagttatctatcgcagcaaagcctgcctgattcaacgcgatggcgaaatggaagaatccaaacagcaactgatcgacaaactgctgacccgtattcagggtgtgatccaggcgcgcgaaagtaaatacatcatgatgcacgcaccgaccgaacgtctggatgaagtcatcgccctgctgccaggtgccgaacgcccaactattctgccgctggcgggtgaccaacagcgcgtagcgatgcacatggtcagcagcgaaaccctgttctgggaaaccatggaaaaactgaaagcgctgggtgccagtagtattctggtcctgccgattgagaagatgatggagtgatcgccatgagctttaacacaatcattgactggaatagctgtactgcggagcaacaacgccagctgttaatgcgcccggcgatttccgcctctgaaagcattacccgcactgttaacgatattctcgataacgtgaaagcacgcggcgatgaggccctgcgggaatacagcgcgaagtttgataaaaccacggttaccgcgctgaaggtgtctgcagaggagatcgccgccgccagcgaacgcctgagcgacgagctaaaacaggcgatggcggtggcagtaaagaatattgaaaccttccacactgcgcaaaaactgccgccggtagatgtagaaacgcagccaggcgtgcgttgccagcaggtcacgcgtccggtagctagtgttgggttgtatattcctggcggctccgccccgctcttcagtacggtattaatgctggcgactccggcgagtattgcgggctgtaaaaaagtggtgctgtgcagtccgccgccgattgccgatgagatcctttatgcggcgcagctgtgcggtgtgcaggacgtgtttaacgtcggcggcgcacaggccattgccgcactggcgtttggtacggaatctgtgccaaaagtggacaaaatcttcgggccgggtaacgcctttgtcaccgaagcgaaacgtcaggtgagccagcgtctggacggtgcggcgatcgatatgcccgcaggcccgagcgaagtgctggtgattgctgacagcggcgctacgccggatttcgtggcttctgatttgctctctcaggctgaacacggcccggacagtcaggtgattttactgacgcccgctgctgatatggcgcgtcgcgttgccgaggccgtcgaacgccaactggcagaactgccgcgtgccgaaaccgcccgccaggcactgaacgccagccgcctgatcgtgactaaagatttagcgcagtgcgtggagatctccaaccagtacggcccggagcacctgatcattcagacccgcaacgcccgtgaactggtcgatagcatcaccagcgccggtagcgtatttcttggtgactggagtccggaaagcgcaggtgattacgcctccggcaccaaccacgttctaccgacttacggttacaccgccacctgttccagcctcgggctggcagatttccagaagcgcatgaccgtacaggaactgagcaaagaggggttctccgcgctggctagtaccatagaaacactggccgccgccgagcgcctgaccgcccacaaaaatgccgttactttgcgtgttaacgcccttaaggagcaagcatgagcaccgtgactattaccgatttagcgcgtgaaaacgtccgcaacctgacgccgtatcagagcgcgcgtcgtctgggcggtaacggcgatgtctggctgaacgccaacgaataccccactgccgtggagtttcagcttactcagcaaacgctcaaccgctacccggaatgccagccgaaagcggtgattgaaaattacgcgcaatatgcaggcgtaaaaccggagcaggtgctggtcagccgtggcgcggacgaaggtattgaactgctgattcgcgctttttgcgaaccgggtaaagacgccatcctctactgcccgccaacgtacggcatgtacagcgtcagcgccgaaacgattggcgtcgagtgccgcacagtgccgacgctggacaactggcaactggacttacagggcatttccgacaagctggacggcgtaaaagtggtttatgtttgcagccccaataacccgaccgggcaactgatcaatccgcaggattttcgcaccctgctggagttaacccgcggtaaggcgattgtggttgccgatgaagcctatatcgagttttgcccgcaggcaagcctggctggctggctggcggaatatccgcacctggctattttacgcacactgagcaaagcttttgctctggcggggcttcgttgcggatttacgctggcaaacgaagaagtcatcaacctgctgatgaaagtgatcgccccctacccgctcagcacgccggttgccgacattgcggcccaggcgttaagcccacagggaatcgtcgccatgcgcgaacgggtagcgcaaattattgcagaacgcgaatacctgattgccgcactgaaagagatcccctgcgtagagcaggttttcgactctgaaaccaactacattctggcgcgctttaaagcctccagtgcggtgtttaaatctttgtgggatcagggcattatcttacgtgatcagaataaacaaccctctttaagcggctgcctgcgaattaccgtcggaacccgtgaagaaagccagcgcgtcattgacgccttacgtgcggagcaagtttgatgagtcagaagtatctttttatcgatcgcgatggaaccctgattagcgaaccgccgagtgattttcaggtggaccgttttgataaactcgcctttgaaccgggcgtgatcccggaactgctgaagctgcaaaaagcgggctacaagctggtgatgatcactaatcaggatggtcttggaacacaaagtttcccacaggcggatttcgatggcccgcacaacctgatgatgcagatcttcaccagccaaggcgtacagtttgatgaagtgctgatttgtccgcacctgcccgccgatgagtgcgactgccgtaagccgaaagtaaaactggtggaacgttatctggctgagcaagcgatggatcgcgctaacagttatgtgattggcgatcgcgcgaccgacattcaactggcggaaaacatgggcattactggtttacgctacgaccgcgaaaccctgaactggccaatgattggcgagcaactcaccagacgtgaccgttacgctcacgtagtgcgtaataccaaagagacgcagattgacgttcaggtgtggctggatcgtgaaggtggcagcaagattaacaccggcgttggcttctttgatcatatgctggatcagatcgctacccacggcggtttccgcatggaaatcaacgtcaaaggcgacctctatatcgacgatcaccacaccgtcgaagataccggcctggcgctgggcgaagcgctaaaaatcgccctcggagacaaacgcggtatttgccgctttggttttgtgctaccgatggacgaatgccttgcccgctgcgcgctggatatctctggtcgcccgcacctggaatataaagccgagtttacctaccagcgcgtgggcgatctcagcaccgaaatgatcgagcacttcttccgtagcctcagttacaccatgggcgtgacgctacacctgaaaaccaaaggtaaaaacgatcatcaccgtgtagagagtctgttcaaagcctttggtcgcaccctgcgccaggccatccgcgtggaaggcgataccctgcccagcagcaaaggagtgctgtaatgaacgtggtgatccttgataccggctgcgccaacctgaacagcgtgaagtctgccattgcgcgtcacggttatgaacccaaagtcagccgtgacccggacgtcgtgttgctggccgataaactgtttttacccggcgttggcactgcgcaagcggcgatggatcaggtacgtgagcgcgagctgtttgatctcatcaaagcctgtacccaaccggtgctgggcatctgcttagggatgcaactgctggggcggcgcagcgaagagagcaacggcgtcgacttgctgggcatcatcgacgaagacgtgccgaaaatgaccgactttggtctgccactgccacatatgggctggaaccgcgtttacccgcaggcaggcaaccgcctgtttcaggggattgaagacggcgcgtacttttactttgttcacagctacgcaatgccggtcaatccgtggaccatcgcccagtgtaattacggcgaaccgttcaccgcggcggtacaaaaagataacttctacggcgtgcagttccacccggagcgttctggtgccgctggtgctaagttgctgaaaaacttcctggagatgtgatgattattccggcattagatttaatcgacggcactgtggtgcgtctccatcagggcgattacggcaaacagcgcgattacggtaacgacccgctgccgcgattgcaggattacgccgcgcagggtgccgaagtgctgcacctggtggatctgaccggggcaaaagatccggctaaacgtcaaatcccgctgattaaaaccctggtcgcgggcgttaacgttccggtgcaggttggcggcggcgtgcgtagcgaagaagatgtggcggcgttactggaagcgggcgttgcgcgcgtagtggtcggctccaccgcggtgaaaagtcaagatatggtgaaaggctggtttgaacgcttcggtgccgatgccttagtgctggcgctggatgtccgtattgacgagcaaggcaacaagcaggtggcagtcagcggctggcaagagaacagcggcgttagtctggaacaactggtggaaacctatctgcccgtcggcctgaaacatgtgctgtgtaccgatatcagccgcgacggcacgctggcaggctctaacgtctctttatatgaagaagtgtgcgccagatatccgcaggtggcatttcagtcctccggcggtattggcgacattgatgatgtggcggccctgcgtggcactggtgtgcgcggcgtaatagttggtcgggcattactggaaggtaaattcaccgtgaaggaggccatcgcatgctggcaaaacgcataatcccatgtctcgacgttcgtgatggtcaggtggtgaaaggcgtacagtttcgcaaccatgaaatcattggcgatatcgtgccgctggcaaaacgctacgctgaagaaggcgctgacgaactggtgttctacgatatcaccgcttccagcgatggccgtgtggtagataaaagctgggtatctcgcgtggcggaagtgatcgacattccgttttgtgtggcgggtgggattaagtctctggaagatgccgcgaaaattctttcctttggcgcggataaaatttccatcaactctcctgcgctggcagacccaacattaattactcgcctggccgatcgctttggcgtgcagtgtattgtggtcggtattgatacctggtacgacgccgaaaccggtaaatatcatgtgaatcaatataccggcgatgaaagccgcacccgcgtcactcaatgggaaacgctcgactgggtacaggaagtgcaaaaacgcggtgccggagaaatcgtcctcaatatgatgaatcaggacggcgtgcgtaacggttacgacctcgaacaactgaaaaaagtgcgtgaagtttgccacgtcccgctgattgcctccggtggcgcgggcaccatggaacacttcctcgaagccttccgcgatgccgacgttgacggcgcgctggcagcttccgtattccacaaacaaataatcaatattggtgaattaaaagcgtacctggcaacacagggcgtggagatcaggatatgttaacagaacaacaacgtcgcgaactggactgggaaaaaaccgacggacttatgccggtgattgtgcaacacgcggtatccggcgaagtgctaatgctgggctatatgaacccggaagccttagacaaaaccctcgaaagcggcaaagtcaccttcttcagccgcactaaacagcgactgtggaccaaaggcgaaacgagcggcaatttcctcaacgtagtgagtattgccccggactgcgacaacgacacgttactggtgctggcgaatcccatcggcccgacctgccacaaaggcaccagcagttgcttcggcgacaccgctcaccagtggctgttcctgtatcaactggaacaactgctcgccgagcgcaaatctgccgatccggaaacctcctacaccgccaaactgtatgccagcggcaccaaacgcattgcgcagaaagtgggtgaagaaggcgtggaaaccgcgctggcagcaacggtacatgaccgctttgagctgaccaacgaggcgtctgatttgatgtatcacctgctggtgttgttgcaggatcaggggctggatttaacgacggtaattgagaacctgcgtaaacggcatcagtgagttgcggggtaagcggatgcgatattgttgccgcatccggcaaaaaaacgggcaaggtgtcaccaccctgccctttttctttaaaaccgaaaagattacttcgcgttgtaattgcgtagagcattacgccccagcacaatccccgcgccaaccatgccacccagcagcaccgccagaatcaaggtaattgcctttttcgggctatcacgacgaataggtaacatcggtttcatcacataacggtaagcatgaatatcaagatcatcaacttttaagctttcgatatccagcaggttttgacgagtctgatagtagtttgggctgaacaccaacggacgggtcgcctcatgcttaatcatgctctccagcgcttcgctccccaaaaggaacaacgtatcttgtgtgatatcttcgccagtctgttgaatctgcggttttgtcacctgcgcctgattcgcatactgcaacgcttcctgaatctgacggatacgcagatctttctgctcctgcgcgactacttcctgcgttcttaaagagtcctgcaagtttttccgtcccagagcaatgttgtctttgagatccttttctagctcttgattcactttatcgtcaacttgctgaatgtattgggccaacttcatttgtgcgccctctgcagtttgcccaacataagaaacagtcaatggtaattgctggttcttaacagaaggttcgatggtaagtttttctcgttcttcctgattatccagcgtttctgctaatgcagagaaggcagaactgaagcgaccaattaacgtctcctgcaaatcgcttactttcggtgcagcctgaccatagataacattcatggcattgttatagccagcaatttgccccacgtcgggctgagtgataattgctgtactcgtccatttctccttcgctactgccaaatatccaatagccagggcaatagccacaatgacggaaatgatgattgtcatcttgccacgccacaactgcactagtaaatcaatcaaatcaatctgttccgggtcatggttttgcccagaaacattattattttctactctcatcattaccctaactgacggaaatttccaagtccgcatagtttagcgataatcctcgtgaatgctataggataagtgataaaaataatgaattgttgtgtaagtaacaaaagacaatcagggcgtaaatagccctgataacaagatgttagtcgctgccaaagagatcgcgggtgtataccttatctgccacatccttaagctcttctgccattcggttagagataatgacgtcggcttgttgtttgaaggtggcgagatcacgttccaggcgagagttgaagaaactgtcttctttcatcactggctcgtagatgatcacttcaacacctttcgccttgatacgtttcataatcccctgaatagaagacgcacggaagttatcactaccgctcttcataatcagacgataaatacccaccacttgcggcttgcgactcaaaatggcatcggcaataaaatctttacgcgtgcggttagcatcgacaattgcgctgatcaggttattcggcacagactggtagttcgccagtaactgcttggtatctttcggcagacaataaccaccataaccaaagctcggattgttgtaatggttgccaatacgtgggtcgagacaaacgccttcgattatttgacgggaattcagacctaaactttctgcatagctatccagttcgttaaagtacgccacgcgcatcgccaggtaggtgtttgcaaaaagtttaatcgcttctgcttcagtggagtcggtaaacagcatcgggatattttgcttaatcgcgccttcctgtaacagagcagcgaaacgttctgcgcgttcactacgctcaccgatgacaatacgactaggatggagattatcgtaaagggctttaccctcacggagaaattccggggagaatataatattttcagtgcgatatttcttatgcatcgctgcggtaaaaccaacgggaaccgtacttttgatgaccataaccgcataaggatttatctcaactacgtctttaattacactttctacactggatgtattgaaataattagttttaggatcatagtcggttggagtggcgatgatgacataatcagcatcccggtaggcttcatttttatctaatgtggcattaaagtgtattttatcactttgcaaaaactgctgaatttccttatcaacaataggagatatccgatcattcagcatagcaacgcgactcggtaaaatatctaatgccacaacctcatgattttgtgcgattagaagcccgttactcaagcctacatagccagtaccggaaatggtgattttcatttcatgctctcagaattaacttaactgtgaatcatgatgtttttagcatcctgataagagctaaaagttttaacgctacgttgttcgatggtcaacgcaacgaaaaacaattcagattttctttataagaatagctgatatttattaagttaatattaagcagtgaaatttagtctataagatatttggcaaaaaaaagcccggtgcaatatacgccgggcctcaattttattgttggttaaatcagattaatccagccattcggtatggaacacaccttctttatcaatacgcttataagtatgcgcaccaaaatagtcacgctgtgcctggatcaggttcgcaggcagaacagcagcacggtagctgtcgtaataggcaaccgctgcggagaaggtcggaaccggaataccgttctgtactgcataagcaacgacatcacgcagcgcctgctggtagtcatcggcaatttgcttgaagtacggagccagcaacaggttagcgatctgtggattttcggcataagcatcggtgattttctgcaggaactgcgcacggatgatgcagccagcacggaaaatcttcgcgatttcgccgtagttcagatcccagttgtactcttcagacgcagcacgcagctgagagaagccctgggcgtaagaaacgattttgcccagatacagcgcacgacgaactttttcgatgaactcagccttgtcgcctgctggctgtgcttgcggaccagagagaactttagatgcggcaacacgctgatctttcagagaagagatataacgtgcaaacacagactcggtaatcaggctcagcggttcgccgagatccagcgcgctctggctggtccatttaccggtacctttgttagccgcttcatccaggatcacatcaaccaggtagttaccgtcttcatcttttttggtgaagatatctttggtgatgtcgatcaggtaactgctcagttcaccgttattccactcggtaaaggtctgcgccagttcttcgttggtgaggttcaggccacctttaagcagagaataggcttcagcaatcagctgcatatcgccgtattcaataccgttgtgaaccatcttcacatagtgacctgcgccatcggcaccaatataggtaacgcatggttcaccgtcttcagctacggcggcgattttggtcaggatcggtgctaccaattcataggcttctttctggccaccaggcataatagaaggacctttcagcgccccctcttcaccgccagaaacaccggtaccgatgaagttaaagccctctgcactaagctcacgattacgacgaatagtgtcctggaagaaggtgttaccaccatcaatgatgatgtctcctttatcgagatatggtttgagggaatcaatagcagcatccgtgcctgcacctgctttcaccattaacaggatgcgacgaggcgtttccagagattcgacaaactctttcaccgtatagtaaggaaccagtttcttgcctggattttcggcaatcacttcttccgtcttctcacgggaacggttgaaaatagagacggtataaccacggctttcgatgttgagcgcaaggttgcgtcccatcactgccataccgactacgccgatctgttgcttggacattacatactcctgtcaggtgtgatcaccgcgctgaatgctcgcggcctggaatgttcgcaaataagtatacaaagtacttattaaagtataaatagcttatccatgcttatatgcttacggctttatatgtctccacatgcgatatttcttaaataatgttttattattaccacttttaattcagggataatgtgaggttattaccctcaaataatatgagataaatagtgctgcaacattgcatttttgccccgatttatccatgatcgaattgtgacatttgtcatacaacgaataggttttgtacttactatggaatggattgccgatccgtctatctgggccgggttaatcacgctgattgtgatcgaactggtcctcggcattgataacctggtctttattgccatcctcgccgaaaaactaccgccgaagcagcgtgaccgcgcacgggttaccgggctgctgctggcaatgttaatgcgcctgttactgctggcgagtatctcctggctggtcaccctgactcaaccgctgttcagcttccgcagctttacctttagcgcccgcgacttaatcatgctgtttggtggtttcttcctgttgttcaaagccacgatggagctgaacgaacggctggaagggaaagacagcaataatcccacacaacgcaaaggtgcgaagttctggggcgtggtgacgcaaattgtggtactggacgccattttcagtctcgacagtgtgattaccgccgtcgggatggtcgaccatttactggtcatgatggccgccgtggttatcgctatcagcctgatgttgatggccagcaagccgttaacgcaatttgttaacagtcacccgacgatcgttattctctgcttaagcttcctgttgatgattggctttagcctggtggcagaaggtttcggcttcgtcattccgaaaggctacctgtacgctgccattggtttcagcgtgatgatcgaggcgctcaatcagttggctatctttaaccggcgacgttttctttccgctaaccagacgctgcgccagcggactaccgaagcggtaatgcgcctgcttagcgggcaaaaagaagatgcggaactggacgccgaaaccgcgtccatgctggtggatcatggtaaccagcagatctttaatccgcaggaacggcggatgattgagcgggtacttaatcttaaccagcgtaccgtcagcagcattatgacgagccgccacgatattgagcatatcgatctcaacgcgccggaagaagaaatccgccagttgctggagcgaaatcagcatacgcggctggtggttaccgacggtgatgacgcagaagatttgctcggtgttgttcacgttatcgacctgctacaacagtctctgcgcggcgaaccgctcaacctgcgggtgttgattcgccagccgctggtgttcccggaaaccttgccgttgttacctgccctggagcagttccgtaatgcccgcacgcactttgcttttgtggtggatgagtttggcagcgtggaagggattgtgacattaagtgacgtcactgaaaccattgccggtaacttaccgaacgaagtggaagagatcgacgcccgccatgatattcagaagaatgcggacggttcctggacggcgaatggtcatatgccgctggaggatctggtgcaatatgtgccgctgccgctggatgaaaaacgtgaatatcacaccattgccgggctgttgatggagtatttgcagcgtattccaaaacctggcgaagaagttcaggtgggggattatttgcttaaaacgttgcaggtagaaagccatcgcgtgcagaaggtgcagattataccgctgcgtaaggatggcgagatggagtacgaggtgtgatggtatcggtcattttacccaatagccgaaaggaataagatgagggaaccgcgccatcggcgatttaccgccgggagcccgggttgccagggtggtggagattgagccaccctggcacgttcaccggcttgagcgttccatagtagcgaggaacatcaagtgaacggaacagccttcgatcttacatattcagaatataatgatgccgccacgaacgcctgatgcgacgctttacgcgtcttatcaggcctacaggactggtcacctggtaacttacatcttctccagcaacttcttcacatctttgccattacgggaatctttattccgctcggcccagtcattcaggcgacgtttcgcttcgtcctgtagatgtttgcgcagtaactgatccacttgcaggctgtaattgagttgctgccagttgccataaacccgcagcggtactggcgtttctttcaggaaatcaatcagtttgctttccccgttccagccacccacgacccgaatatcaaactgggtgtcgcaggtttgatctgccagattcaacatgccttcccctgtcagcgccagcacagggctttgaccttgcatgtcgtttaacgtcacgacgccatccttcaacgtcaaatcggtggtaaagcggtcaagccgcgtcacgttatcaaagttttcagcggccttcacatcaccgccattacgctctaccgcttgctgaatcatctgctggaagttcatcccttccatgcgcgtgtcggtcatttcgacatgtgcctgtccttgccagttgtggcggaatgcgtcggcatctatgtcagcaccggagaaatcaccagccagactcatttttccggtcaagctaatcggatagttaaacgccttcagaatggtaccaatctcaacgttttccagccgtggctggaagtttatccgcggatttatacttgtcgcgtccagcgtgcccggcagactaacctgtccaccgttaagtttgccctgcagttgagtaatttccagcaaaccgctcttgttggtcatttgcgtggcaacatctgtaaaattcattccgcgccagcgcacgttactggcctgcaacaaaatatcagccgtaaagccttgcagtccctgataggccggttcatcaatacggctagaaatgaccgggcgcggcaacgtactttggctctgcccctgctgcgcggcaccgttttcaccattcgcggtttcattaagcgggatgaggttgtcaagattcagttgcgggaattgcagcctcagctgccattccggtttctctgtcagcgtaacctgtgcttgcccgcttagcgtactatcattggcggtcaaactaatttggttaaaactaaggcgtttatgactctcctgccactgggcctggaaactcccctgcccctgaataccttgttttggtaaatcggcaccctgcaactgccagttaatttgttcaatagccgccgttaaatcatgcggataatcagaagcatctaccgtaccgttaagggatatcgtgagatcgcgctgatcgcgattaacccgcccggagaactcaaaactaccacgatgttggggatcttgttccatttgcaggcgaatattgcggattgtcacctgctcgtcatcttcatgctggaacaccagcacgctgtccgccaccttaagactggatatatcaaagctccatccgcgatcgtcactcagatccggcaaggtattgtcgcgcggtgcaaccggagcgtcttcactgcgcaccgcttccgtctgcggcgtcagttggatcactgccccttttagcatcacctgcttaacgctcagttgatgactcagtagtggtaaaagcgccacgtccagacgcatgttgtcggcgcgaaccagtggctggcttgcgccctgggcggtgagagacattcgcccggagaggatactaagctgcggccagacgtgccaacgcagtggcccgtcgagctgcaattgataaccgctacgtgcagcaacttgcttgaccatatagtcgcggaaatcattcggattcaccagcaacactaacgcagataacccggccaccagcacgaccaggagtatcatcagcgtcgtcagaaatcgtctcatggtatcctcaatgggcctgaattagtctttatcgattcggctggctaccgcgccctgctggttgcgatatttcgcatcttcacggcggttgtaaggtcgcaccgccgggccggaaagcggctcaaagctcagcgcaccaattaacatgcccggacgcagcgccagcggcagcttaccggagttgtagaactccagcacaatgcaaccagaccagcccggatcgatgcggtgcgcggtgacgtgcaccatcagccccagacgcgccagactggaacgcccgtccagccagcccaccagatcggctggcagcgtcacgctctccagcgtcaccgccagcgccagctctcctgggtgaagatagaacgcctcgccctcgtcgagaacgatctcatcgctcatcacgcggtcaagcgcggcgctcacttcatctttgggaccgctcagatcgataaacgctgccgtgtgaccacggaaggtacgaaatttattgcccaggcgtacatccaccgtcgcgccgttaatacgctccactggcggacgtgggttgatgctcaaacggccttcatcaagccaggcttcaatatctcggtcacacagacgcatggcattttctcctttcgcgcatcactcccttaacgccaattacgtcaagggcatactaggttatcactgaacggtacacaatttatcaagcttattcaaagaactgacttattttcgctttcaatatatcgatcgcgatgcggtttttcccgccgcgcggcacgataatgtccgcatattgtttagaaggctcaatgaattgcaggaacatcgggcgcacggttttttgatattgcgccatcacactatccatactacgcccacgctcgttaacgtcacgcttgatgcggcgcatcaggcagatatccagcggggtatcaacgaaaatggagaagttaagttcgtcacgcaaacgcgcatccgtcagcaacaaaatgccttcgagaatgatgaccttcttcggctcaaccgtcaccgtttctttcatacgcgtatgttcaacatagctgtaaaccggcaggtcaattgcgctgccgcgtttcaacgcttgtaaatgctcaagcagcagactgtgatccatcgcgctgggatggtcgtagttggtcttaacgcgttcttccatgctcagatggctttgatctttgtaatagcagtcttcgggaattacgccgatgtgttcatcaccgacttgctcacgcaattcacgataaagggtactggcaataagactcttgccggaagcgcttgcgccagcgataccgataatgacgcactgatgagactgatcagtcatatatttagcgacctgattaacctggatgttaggaagggggcgacgaagcgccaaacgcggcaattatagggatttcatccgtctgataccagtcgaatagcgttgccgcgcgctcagagttaattgttgacaaagaattcccgggggcaaattacgttgatcagttttatgtaaggtaaaaaatgttaaacgcagttgcgcaaattatccgcctttacgtcactttatgagcaattcgcatataaaatgtaaaacttttgtactagcataaacacagaaacgaatactggcgaccaggtcttgcggataaagcggtaatgagcaaacaaagtcagcatgtattaattgccctgccccacccgctgcttcacctggtcagtttaggtttagtcagctttatctttacccttttcagccttgagcttagccagtttggcacccaactcgccccactgtggttcccgacgtccatcatgatggtggcgttttatcgccatgccgggcgcatgtggccgggaattgcgctgagctgtagcctgggaaatatcgccgcatccatcctgcttttttccaccagcagcctgaacatgacctggacgaccatcaatattgttgaagccgtggtcggggcagtgctgctacgtaaattgctgccgtggtataaccccttgcaaaatctggctgactggctgcgtctggcactcggcagcgccattgttccgcctctgttggggggtgttctggttgtcctgctgacgcccggagacgatcctctcagggcatttttgatatgggtactgagtgaatccatcggcgctctggcactggtgccgctgggattgttatttaaaccacactatctgctgcgccatcgcaacccacggttgctttttgagagcctgctcacgttagccatcacactgacgttaagctggcttagcatgctgtatctgccgtggccttttactttcattattgtgctgttgatgtggagcgccgtgcgtctgccacgaatggaagcctttttgatcttccttaccacggtgatgatggtgagcctgatgatggccgcggatccccccctgcttgctacgccgcgtacgtacctgatgagccatatgccgtggctaccgtttttgctgatcctgctgcccgccaacatcatgaccatggtgatgtatgcctttcgtgcggaacgcaaacacatttccgaaagcgaaacccactttcggaacgcgatggaatattccgctatcggtatggcgttagtgggcaccgagggacaatggctgcaaaccaacaaagcgctctgccagtttctcgggtacagtcaggaagagctgcgcggactcacctttcagcaactgacctggccggaggatctcaataaagatctccaacaggttgaaaagctgataagcggtgaaataaacacctatagtatggaaaaacgctactacaaccgcaatggcgatgttgtctgggcgttgcttgccgtcagtctggtgcgccacacggatggcacgccgctctattttatcgctcagattgaagacattaacgagctaaaacgcaccgaacaggtcaatcagcaactgatggagcgcatcactctggctaacgaagcgggcgggattggcatctgggagtgggagttgaagccgaatatttttagctgggataagcggatgttcgagctgtatgaaattcctccacatatcaaaccgaactggcaggtgtggtacgagtgcgtgctgccggaagatcgccagcatgccgaaaaagtgattcgtgatagcttgcaaagtcgcagcccctttaaactggaatttcgcattaccgtaaaagacggtattcgccatatccgcgccctcgccaaccgggtactgaataaagaaggcgaagtcgaacgtctcctcggcatcaatatggatatgaccgaagtgaaacagcttaacgaggcattgtttcaggaaaaagagcgcctgcacattacgcttgattccatcggtgaagccgtggtctgtattgatatggcgatgaaaattacctttatgaatccagtggcggagaagatgagcggctggacgcaggaagaagcgttaggtgttccgctcctgacggtgttgcatattacttttggcgacaacggaccattaatggagaacatttacagtgccgacaccagtcgttccgcgatcgagcaagatgtggtgttgcactgtcggagcggcggcagttacgacgtgcattacagtattacgccgttaagtactctggacggcagcaatattggtagcgttctggtgattcaggacgttaccgaaagtcgcaaaatgctgcgccagctgagctacagcgcctcccatgatgcactgacgcatctcgccaaccgcgccagttttgagaaacaactgcgtatcctgctgcaaacggtaaacagtacacatcagcgacatgccctggtgtttatcgatcttgatcgctttaaagcggtgaatgacagcgccgggcatgcggcgggtgacgctttgctgcgcgaactggcgagcttaatgctgagtatgctgcgttccagcgacgtgctggcgcgactcggtggggatgaatttggtctgctgctaccagactgtaatgttgaaagcgcgcgttttatcgctacacgcattatcagtgccgtgaatgactatcactttatatgggaaggccgtgtgcatcgggtaggtgccagtgccgggattaccttgattgatgacaacaatcatcaggcggcagaagtgatgagccaggctgatatcgcctgttatgcctccaaaaatggtggccggggccgggtgacggtttacgaaccgcagcaagctgccgcacatagcgaacgggcggcgatgagccttgatgaacagtggcggatgattaaagagaatcagttgatgatgctcgcccacggtgtcgctagcccacggatcccggaagcgcgtaatttgtggctgattagtcttaagctctggagttgcgaaggcgagattattgatgaacaaacatttcgtcgtagcttcagcgatccggcgcttagccatgctcttgaccgccgggtattccacgaatttttccagcaggccgcaaaagcggttgccagtaaaggcataagcatctccctccccctttccgttgccggtttgagtagcgccacgctggtgaatgatctgcttgagcagctggaaaatagccctctaccaccacggttattacatctgattattccggctgaagcgattttagatcacgcagaaagcgtgcaaaaactgcggctggcgggatgtcggatagtgctcagccaggtgggccgcgatctgcaaatcttcaacagcctgaaagcgaatatggcagattacctgctacttgatggtgagttatgcgccaacgtgcagggtaatttgatggatgagatgctgattacgattattcaggggcacgctcagcgactcgggatgaaaaccatcgccgggccagtcgttttacccttagtgatggatacgctttctggcatcggcgtcgatctgatttatggtgaggtgattgccgatgcccaaccgctggatttgctggtgaatagtagttatttcgcgattaactgaggcgtgcttccccatcgcctgatgcgacgctaacgcgtcttatcatgcctacaaatcgctcattccccaggccggataaggcgctcgcaccgcatccggcgaccaacgtcatgcttcgtctggttgccagccttccgtataccagatatgcaacagcgcataagaacgccagggcttccagcgctcggcataacggcggatttgcgccggtgtcattcccggaaatcgctgtttaatcagataatcatccggcaggaaaacatctttcgcctgccagccacgcaaagcaaaataattcgccgtccagcgcccgatacccggaaaagtttgcagcgttttcatcgcctgctccacatcgcccggtattgtcattggtaaggtgccctccagcgccgcatttgccagatgaatcagcgcctctgcccgtttcaacggcatacctaacgcttttaatgcctgcgggtctgctgctgccagccgctgaggcgtcgggaagcagatatactccggaaaatcatccagccgttcgccataaagctgtgccactctggcggtcaattttgccgccatcgccacgctcaccagttggcctaaaatcgcccgcacgccctgctcaaaagcatcaacacagccgggtaaacgcaatccgggccgcgccgcgcctaacctgcccaacgcaccgttaacaatttgtgggttacattgcagatcaaacaggcggctcattttcgccagacactctgcggcaacaggttctaaacctgcacttaaatttatgtgcagagtatggcgggctatatccggaatagcagtcaccacgccgcgatattcgcccaccgccagactacgggcataataactgtccgcgaccgtttccacactgctcaccgcacgggcggcgagaaatcccaacatccagctccagtcatacggcggctgccagttcagggtatacatcgcatctccttattcatccgctttcagcataaacgttattcagacgctgcgctttgctttcatattccggttgtcgcgacggcaacatttcgctaaagtcacgccccttcttcaccggcatggggattatttcgtgtttattggttttgattacggtacagcaaactgtagtgtggcggtcatgcgtgacggtaaaccgcatttgctaaaaatggaaaacgacagcacgctgctgcctagtatgctttgcgcgccaacgcgtgaagcggtaagcgaatggctgtaccgccatcatgatgttccggcagacgacgatgaaacgcaggcgctgttacgtcgggcgattcgttataaccgcgaagaagatatcgatgttacggcgaaaagcgtgcagttcggtctttccagtctggcacagtacattgatgatccagaagaagtgtggtttgtgaaaagtccaaaaagcttcctcggtgccagcggcttaaaaccgcagcaggtagcgctgtttgaggatctggtctgcgcaatgatgttgcacattcgccagcaggcgcaggcacagctgccagaagcgattactcaggcggtgattggtcgtccgatcaacttccaggggctgggcggtgatgaagcaaacacccaggcgcaagggattctggaacgcgcggcgaagcgtgccggattcagggacgtggtattccagtacgagccggtcgcggctgggctggattacgaagccaccttgcaggaagaaaaacgggtgctggtggtggatatcggcggtggtacgactgactgtagtttgctgctgatggggccgcagtggcgtagccgtctcgatcgtgaagccagcctgctgggtcacagtggttgccgtattggcggtaacgatctggatatcgcgctggcgtttaaaaacctgatgccactgctgggtatgggtggcgaaaccgaaaaaggcatcgccctgccgatcctgccgtggtggaatgcggttgccatcaacgacgtacctgcgcagagtgatttctacagtagtgccaacggtcgtctgcttaacgatctggtacgcgatgcccgcgaaccggaaaaagtggccctgttacagaaagtctggcgtcagcgtttaagctatcgcctggtgcgtagcgcagaagagtgcaaaattgctcttagtagcgtagcggaaacccgcgccagtctgccgtttatcagcaatgaactggctacgctgattagccagcgagggctggaaagcgccctcagccagccactgacgcggattctggaacaggtgcaactggccctggataacgcccaggaaaaaccggacgttatctacctgaccggcggtagcgcccgttctccgctgattaaaaaagcgctggcagaacagttgccgggcattccgattgcaggcggcgatgactttggctccgtcaccgccgggctggcacgctgggcggaagtggtgtttcgttaattgaaaaatggctcagcagcggcttaaatctgcctgcgcctgagccagtttttctgctgcctgacgtaacggttccatcaacggcatggtccgtgctggagcatgaaggcggaatcgctgcaactctgtcgcgccgactgtcaacgcgctttccagccgatgtcgtttggcggtcattttcgccattaccgcttgtctgtctgctggcgttatcgcttcattcggcctgaacacaaaacggcgttcacagctcgctttccagtcgataaccgcctgggtcagatggtcgccaaaccctttcacttgcttaacgccacgacgggtaacatctgcggctgtttcaataccaaaagaccgtaacgccgctttacgcgcagggccaacgccgggaatagaggcaacatcaataaaaaatccctccagaaacttctgcttctgccgttcccttgcagtgtcatgaagtgctgccagagcgcgtttctcttcttccggtaacccgagaatttcgtccttcattttttcgagcatcgtccgtttggcgataaaaccttccaggccgcctacctgctggatctggcggactaaatggtcatagtccattttcgcacgattaaatgcctcacggcgttgctgaacttctgctttgtacgctttgcttgtcagactgccaataatccagatagccgccagcacaggaaccaaaataatataacgcggttctgcctgaaggccgcaaagcagcaggcttaatgcactcagtgcgatctcaagcagaatgatgtattcgcgccgtaacaggcctaaaggaagcggcctgccagtcggttggaaatgatcgggtaatggcagttgcaatgctggcggtgctacactcgccatcaccatcgcccagactttcgccagcacaaaattcccgccggtggtaatgacctcttcgccgagatcaataaaatagataacaccttgattatccagcgcacaccacgggcagtcagtcaaatgagcggggtaaacatgcattgcactaacgatacatttctttaactgttggcgtagagagtccagtgccgctacccacgctttagccgtcggacgcccggttgccacgccactttccgtgaatgcctgctgaaacatggcttcaacatcactcggtaacatgcttagcggaatagatcgtggcggcggttttaaaccacgtcgctgattatcactcgcgtaggcataacggaaatgggtaatatccgtctccagcgcattacccgcatcagagataagcggcacaccagaataaggatgccgcccaccaaacaagacgtgaaaaattagcaacgcaaggccaaaattatcgtgattttctgtgcgttcaaaaccgacaaaacttggcaaggtttgtagctctggcggcgtaaaatggctcacgccgacttcgcataaatgcagtgtgccattggcgttaatttgaaaggagtcgctatcaatcagtaccactttgctgtcgcgacctaccataaaactgttctggtttacgtcacccacgacgtgcccgtgctcgtgaaccgtagcaaaagaactagcaatattgcgcgcaacatagagtagaaaatcccacgcacaatgagggtaactctggcgacgatgtgccgggctatagatcatatgaatcggttctttaccagaaacttttggcatcataaaaccgataacttttccgcctcgtccaccgtgaagcgttgcctgcggccaggcgacataattcaacaactgcgcgtcagctgtcgcagccataaaggcaagtttgtcctgttttaaggcgggtggcggcgtgtgataaatcttggcgacgctatcgacaaactcctcgatatcataaaccgcgccttcaccacctttgcccagttcacggccaagagtggtcaattcacctgtgcttgtaaatacttttatatttgttttcataatatttcgcgggtagttatattatatttcaatgaataataacaactaaccattaaaattatttctatatggggaaaacccactcaagaataaaaatgataatgcaattttatcaggatacaattcaatttcggcctgataatgattaacttccacaggtttttgctaactttgactacaaagggattctggagaaaaaatgaaaaagatattacttatgttgagtctgctattttttactaccgcgggctttagtgaagttagcgatacgttagtgacgggaggttatgataaacaagcgatgtctgacgcgattaaacatgcgcggaaagaaaccgataaattcatcgaggttatgaataaaaaagatgccgatactttcgcagtcaaagccccgataaccgatcacggaagaaccgagcatttctggcttacggatgtcacttattctaacggcatgtttattggcgtaatcagcaatgaccctggtattgttacaaacgtagaatatggccaggagtggaaaatcaagaaagaagatattagtgactggatgtatacgcgcggggataaaatttacggcggttataccattgatcctttattggtcacctatccaaaagaagaagccgacgagctaagagcaaaattagttcgctaatcagccgttatatttattgtttaaactggcggttgaattgttgtcttcaaccgccatgagaaactcactctgcccacagcgccagtgccaacgttttatcatcatccgtacgctcgtttaccgccgggctggacaaaaactgctttaacaattcaggtaataaatcgagttgttcctgcgttgctgccgccagtccattgaaaaacggggtaaagaaaggcacatgaggagaattatccagcatatttaacgccagtcgctggataccatccgtaaatgctgcaactttgtgcgcacgcccagtgctggtgagagtttccagtctggaaacggcatcttcgtcggtaatgaagtgcgtcatgttggcatattcacccgccatcggcgtgagaggcaattgcagaccgtgacccaaatctaccaccacgccgccatcgccaatctgcataatcaaggtgccgtcagggctactaatcagtcccagaaatgtgcaggcaaaatcgcgaaccgctaattctttggcttccgcctcggcaaaaagtcgttgacgaatggtcagtaccatatttgtggcgaggacatcattaagccccaattccccgccctgcactttttggctcatataagccatcgcttcattgacggcgagcatcgcgccttcgccaccctggctgacactgcctgcgccatcagcgacaaatacgctcaataatggctgctggtcatttaaccaggcaatctgcatctggcaggcatcctgacaaggcaagtccgcgctgatgtggctcgttccaacggtacttgcatagaccagacgccagctcacacactcgtccagccttttggcgcttccagcacaacttccgttcccggcgtggagcgggaaacgctacgcaggctactggataaccagctaaacagttcacggaattgtaatccttgcagaggcaaaggctgacgaacgctaatttgtgccagcgtcttcatatccgccccctgaacaccgatggaaaagaaagcaaaccttttatcttcttccccccgaaacactttgttggctgcagcctgccactcatcggttggtgcaccatcggtaatcaggaaaatccacgggcgataatagctaataccatttgcacgatactcacgtttccgctcctctaccatatccagggctttggtaatggccgcacccattggtgtatcgccctgggcaaacaggatgggcggaaaaaaattagcggcgctggtaaagggttgttccacatgcaccgggccgaacgtcacaatgccgagttccactctttttaaagccagcggatcagcaagcagttcatcacgaaaggtaaccaatccggcgttaagttcattaataggtctaccgttcatagaaccagaaacatccagcagcaaaatgcaggggcaacgtggttccgggttactggcaaaatcgctggtggcaaacgtgatttgttcgctcataagaaatcctttcttagagaattatcgaggtccggtatcataccgactgcaataatgaaataagagcaaacgaagaaactttcagaattaggcccggcggcgcagaaaattttgctattcgcctcgcaagaacggagagccgtcgattgacactaagggcggagtgacataatttcaggagtgagggttagggagaggtttccccctccccctggtgttcttagtaagcctggaagctaatcactaagagtatcaccagtatgatgacgtgcttcatcataaccctttccttattaaaagccctcttctccgggagaggctttcccgtttcagcgtcccgctgaaatcatcggcttacctcctttcgccctgaatgcagtctatcgctaacgcgtgaataaaatagtttcctctgtgattattgcgtaacgactcgcaaagaatatttgctggcaggatcgcagactacaaagcctgcggattgacaatcttatcgtgaagacatactttcaggagtgagggtagagcggggtttcccccgccctggtagtcttagtaagcggggaagcttatgactaagagcaccacgatgatgagtagcttcatcatgaccctttccttatttatggccccttcctcgggaggggctttcccgtttcagcgtcccgctgaaatcgtcggcttacctcctttcgccatgcaagcagtctatcgctaacgcgtagataaaatagtttcctgtgttattactggatgcgtgctcgcaaatgtgcccgtcattcagacgattccagacagtgtttcataattcctccatttttctcccttattggctggctacactagtatcattccgcgaaacgtttcaggaagagaaactcttaacgatgaaaggtagttataaatcccgttgggtaatcgtaatcgtggtggttatcgccgccatcgccgcattctggttctggcaaggccgcaatgactcccggagtgcagccccaggggcgacgaaacaagcgcagcaaagcccagcgggtggtcgacgtggtatgcgttccggcccattagccccggttcaggcggcgaccgccgtagaacaggcagttccgcgttacctcaccgggcttggcaccattaccgccgctaataccgttacggtgcgcagccgcgtggacggccaactgatagcgttacatttccaggaaggccagcaggtcaaagcaggcgatttactggcagaaattgaccccagccagttcaaagttgcattagcacaagcccagggccaactggcaaaagataaagccacgcttgccaacgcccgccgtgacctggcgcgttatcaacaactggcaaaaaccaatctcgtttcccgccaggagctggatgcccaacaggcgctggtcagtgaaaccgaaggcaccattaaggctgatgaagcaagcgttgccagcgcgcagctgcaactcgactggagccggattaccgcaccagtcgatggtcgcgttggtctcaagcaggttgatgttggtaaccaaatctccagtggtgataccaccgggatcgtggtgatcacccagacgcatcctatcgatttagtctttaccctgccggaaagcgatatcgctaccgtagtgcaggcgcagaaagccggaaaaccgctggtggtagaagcctgggatcgcaccaacagcaagaaattaagtgaaggcacgctgttaagtctagataaccaaatcgatgccactaccggtacgattaaagtgaaagcacgctttaataatcaggatgatgcgctgtttcccaatcagtttgttaacgcgcgcatgttagtcgacaccgaacaaaacgccgtagtgatcccaacagccgccctgcaaatgggcaatgaaggccattttgtctgggtgctgaatagcgaaaacaaggtcagcaaacatctggtgacgccgggcattcaggacagtcagaaagtggtgatccgtgcaggtatttctgcgggcgatcgcgtggtgacagacggcattgatcgcctgaccgaaggggcgaaagtggaagtggtggaagcccagagcgccactactccggaagagaaagccaccagccgcgaatacgcgaaaaaaggagcacgctcctgatgcaggtgttacccccgagcagcacaggcggcccgagccgcctgtttattatgcgtcctgtggccaccacgctgctgatggtggcgatcttactcgccgggattatcggttatcgcgccctgcccgttagcgcgctgccggaagtggactatccgaccattcaggtggtcacgctctacccaggtgccagcccggatgtcatgacctctgccgttaccgcgccgctagaacgccagttcgggcagatgtctggcctgaaacagatgagcagccaaagttccggcggtgcgagtgttatcactttgcagttccagctaacattaccgctcgatgtcgccgagcaggaagtgcaggccgcgattaacgctgcgaccaacttgttgccgagcgatctgcctaacccgccggtttacagcaaagtgaacccggcagatccgccgatcatgacgctcgccgtcaccagtaccgccatgccgatgacgcaagtggaagatatggtggaaacccgcgtcgcgcagaaaatcagccagatttccggcgtcggcctggtgacgctttccggcggtcagcgtccggctgttcgcgtcaaacttaacgctcaggcgattgccgccctcggcctgaccagcgaaaccgtgcgcaccgccattaccggcgctaacgttaacagcgcaaaaggtagcctcgacggcccttcccgtgcggtcacgctttccgcgaacgaccagatgcaatccgccgaagagtatcgccagctaatcatcgcctaccagaacggcgcgccaattcgtctgggcgatgtcgcaactgtagagcaaggtgcagaaaacagctggctcggcgcgtgggcgaacaaagaacaggccattgtgatgaatgttcagcgccagcccggtgctaacattatctccaccgccgacagcattcggcagatgctgccacagctcactgagagtctgccgaaaagcgtgaaggtgacagtgctttccgatcgcaccaccaatatccgcgcatccgtcgatgatactcagtttgaattgatgatggctatcgcgctggtagtcatgattatctacctgtttttgcgcaatattccggcgaccatcattcccggtgttgctgtaccgctgagcttaatcggcactttcgcggttatggtgtttctcgattttagtatcaataacctgacactgatggcgttaactatcgccaccggattcgtggtcgatgacgccatcgtggtgatcgaaaacatttcccgctatatcgaaaaaggcgaaaaaccgttggcggcggcgctcaagggcgcaggtgaaatcggctttaccattatcagcctgaccttcagtctgattgcggtgttgatcccactgctgtttatgggcgatatcgtcgggcgactgttccgcgaatttgctattaccctggcggtagcgattttgatcagtgcggtggtgagcctgaccctgacaccgatgatgtgcgcgcggatgctcagccaggagagcttgcgtaaacagaaccgcttctcccgtgccagcgaaaaaatgttcgacaggataatcgccgcctatggtcgtggactggcgaaagtgctgaatcatccgtggctgaccttaagcgtggcactcagcacgctgctgcttagcgtgctgctgtgggtgttcattccgaaaggtttcttcccggtacaggacaatggcattattcagggcactttgcaggcaccgcaatccagctcctttgccaatatggcccagcgacaacgccaggtcgcggacgtgattttgcaggatccggcagtgcaaagcctgaccagttttgttggcgttgatggcactaacccgagcctgaacagtgcacgtttacaaatcaacctcaaaccgttggatgaacgtgatgatcgggtgcaaaaagtcatcgcccgtctgcaaacggcggtagataaagtgccgggcgtcgatctcttcctgcaaccaacgcaggatctgactattgatactcaggtcagccgcacccagtaccagtttaccttgcaggccacgagtctggatgcgctcagtacctgggtgccacagttgatggaaaaactccagcaactgccacagctttctgatgtctccagcgactggcaggacaaagggctggtggcgtatgtcaatgttgatcgcgacagcgccagccgtctggggatcagcatggcggatgtcgataacgccctgtacaacgcgtttggtcagcggctgatttccactatttatactcaggccaaccagtatcgcgtggtgctggagcacaacaccgaaaataccccaggcctcgcggcgctggataccattcgcctgaccagcagcgacggcggcgtggtgccgctaagcagtattgccaaaattgagcagcgttttgcgccgctctccatcaaccatctggatcagttcccggtaacgaccatctcctttaacgtgccggataactatagcctgggcgatgcggtgcaggcgattatggacaccgaaaagacgctgaatctgccggtggatatcaccacgcagttccagggcagcaccctcgccttccagagcgcgctgggcagcactgtctggctgattgtcgcggcggtggtggcgatgtatatcgtgctcggcattctgtacgagagctttattcacccgatcaccattctcagcacgctacccaccgcaggggttggcgcactgctggcgttgctgattgctggtagcgaactggatgtgattgcgattatcggcattattttgctgatcggtatcgtgaagaagaacgccatcatgatgatcgacttcgcgctggctgctgagcgcgagcaaggcatgagcccgcgcgaggcaatctaccaggcttgtctgttgcgttttcgtccgatcctgatgaccactctggcggctctgcttggcgcgctgccgctgatgttgagtaccggggtcggcgcggaactgcgtcgtccgttaggtatcggcatggtcggcggtctgattgtcagccaggtgctgacgctgtttaccacgccggtgatttatttgctgttcgaccgcctggcattgtggaccaaaagccgctttgcccgtcatgaagaggaggcgtaagtgaagttttttgccctcttcatttaccgcccggtggcgacgattttactgagcgttgccattaccctgtgcggcatactgggcttccgtatgctgccggtcgccccgctgccgcaggtcgattttccggtgattatcgtcagcgccagcctgcccggtgcgagtccagaaacaatggcgtcttccgttgccacgccgctggagcgcagtcttgggcgcattgccggagtcagtgaaatgacctccagcagtagcctcggcagcacgcgtattattttgcagtttgattttgaccgggatatcaacggcgcagcgcgtgatgtgcaggcggcgatcaacgctgcacaaagtttgctgcccagtgggatgcccagccgcccgacctatcgcaaagcgaacccgagcgatgcgccaattatgatcctcacgctgacgtccgatacttatagccagggtgaactgtacgatttcgccagcacgcagctggctccgacgattagccaaatcgacggtgttggtgatgtcgatgtcggaggcagcagtctgcccgccgtacgcgtcgggctgaatccgcaggcgctgtttaatcagggcgtgagcctggacgacgtacgcaccgccgtcagcaatgccaacgtgcgtaaaccgcagggcgcgctggaagatggcactcaccgctggcagatccagaccaatgatgagctaaaaaccgccgctgaatatcagccgttgattattcactacaacaacggcggcgcggttcgtctgggcgatgtggcgacggtgaccgacagtgtgcaggatgtgcgcaacgccgggatgaccaacgccaaaccggctattttactgatgatccgcaaactgccggaagccaatattatccagacggttgacagcatccgggcaaaattaccggagttgcaggaaaccattccggcggcgattgatctgcaaattgcccaggatcgctcccccaccattcgcgccagcctggaagaagtcgagcaaacgctgattatcagcgtggcgctggtgattctggtggtgtttttattcctgcgcagcggtcgcgccactattattcccgccgttagcgtgccggttagcctgattggtacgtttgcggcgatgtacctgtgcggattcagtctcaataaccttagcttaatggcgctcaccatcgctactggtttcgtggtggatgacgccatcgtggtgctggaaaacattgcacgtcatctggaagcgggaatgaaaccgttgcaagccgcactgcaaggtactcgcgaagtcggttttacggtgctgagcatgagtctgagtctggtggcggtgttcctgccgctgctgttgatgggcggattgccgggccgactgttacgcgaatttgccgtgacgctttctgtcgccattggtataagcttgctggtttctctgacattaacgccaatgatgtgtggctggatgctgaaagccagcaagccgcgcgagcaaaagcgactgcgtggttttggtcgcatgttggtagccctgcaacaaggctacggcaagagtctaaaatgggtgctcaatcatacccgtctggtgggcgtggtgctgcttggcaccattgcgctgaatatctggctgtatatcagcatcccgaaaaccttcttcccggagcaggacactggcgtgttgatgggcgggattcaggcggatcagagtattagctttcaggcgatgcgcggtaagttgcaggatttcatgaaaattatccgtgacgatccggcagtggataatgtcaccggctttacaggcggtagccgagtgaacagcgggatgatgtttatcaccctcaagccacgcgacgaacgcagcgaaacggcgcagcaaattatcgaccgtctgcgcgtaaaactggcgaaagaaccgggggcgaatctgttcctgatggcggtacaggatattcgcgttggtgggcgtcagagcaacgccagctaccagtacacgttgttatccgacgacctggcggcactgcgagaatgggagccgaaaatccgcaaaaaactggcgacgttgccggaactggcggacgtgaactccgatcagcaggataacggcgcggagatgaatctggtttacgaccgcgacaccatggcacggctgggaatcgacgtacaagccgccaacagtctgttaaataacgccttcggtcagcggcaaatcagcaccatttaccagccgatgaaccagtataaagtggtgatggaagtggatccgcgctatacccaggacatcagtgcgctggaaaaaatgttcgttatcaataacgaaggcaaagcgatcccgctgagctatttcgctaaatggcaaccggcgaatgccccactaagcgtgaatcatcagggattaagcgcggccagcaccattagctttaacctgccgaccggaaaaagcctcagcgacgccagtgcggcgatcgatcgcgcaatgacccagcttggtgtgcctagcacggtgcgcggcagttttgccggcacggcgcaggtgttccaggagacgatgaacagccaggtgatcctgattatcgccgccatcgccacggtgtatatcgtgctgggtatcctttacgagagttacgtacatccgctgacgattctctccaccctgcccagcgcgggcgttggagcgctgttggcgctggagctgttcaatgccccgttcagcctaatcgccctgatagggatcatgctattaatcggcatcgtgaagaaaaacgccattatgatggtcgattttgcgcttgaagcccaacggcacggtaacctgacgccgcaggaagctattttccaggcctgtctgctgcgttttcgcccgattatgatgactaccctggcggcgctgtttggtgcgctgccgctggtattgagcggcggcgacggcagcgagctgcggcaacccctggggatcaccattgtcggcggactggtaatgagccagctccttacgctgtataccacgccggtggtgtatctctttttcgaccgtctgcggctgcgttttagccgtaaacctaaacaaacggtaaccgagtaaatgacagatcttcccgacagcacccgttggcaattgtggattgtggctttcggcttctttatgcagagcctggacaccaccatcgtaaacaccgcccttcccagtatggcgcaaagcctcggggaaagtccgttgcatatgcacatggtcattgtctcttatgtgctgaccgtggcggtgatgctgcccgccagcggctggctggcggacaaagtcggcgtgcgcaatattttctttaccgccatcgtgctgtttactctcggtagtctgttttgcgcgctttccggcacgctgaacgaactgttgctggcacgcgcgttacagggcgttggcggcgcgatgatggtgccggtcggcagattgacggtgatgaaaatcgtaccgcgcgagcaatatatggcggcgatgacctttgtcacgttacccggtcaggtcggtccgctgctcggtccggcgctcggcggtctgctggtggagtacgcaagctggcactggatctttttgatcaacattccggtggggattatcggtgcgatcgccacattgctgttaatgccgaactacaccatgcagacgcggcgctttgatctctccggatttttattgctggcggttggcatggcggtattaaccctggcgctggacggcagtaaaggtacaggtttaagcccgctgacgattgcaggcctggtcgcagttggcgtggtggcactggtgctttatctgctgcacgccagaaataacaaccgtgccctgttcagtctgaaactgttccgtactcgtacctttagcctgggcctggcggggagctttgccggacgtattggcagtggcatgttgccctttatgacaccggttttcctgcaaattggcctcggtttcagcccgtttcatgccggactgatgatgatcccgatggtgcttggcagcatgggaatgaagcgaattgtggtacaggtggtgaatcgctttggttatcgtcgggtactggtagcgaccacgctgggtctgagcctggtcaccctgttgtttatgactaccgccctgctgggctggtactacgttttgccgttcgtcctgtttttacaagggatggtcaacagcacgcgtttctcctccatgaacaccctgacgctgaaagatctcccggacaatctggcgagcagcggcaacagcctgctgagcatgattatgcaattgagcatgagtatcggcgtcactatcgccgggctgttgctgggactttttggtagtcagcatgtcagcgtcgacagcggcaccacacaaaccgtctttatgtacacctggcttagcatggcgttgatcatcgcccttccggcgttcatctttgccagagtgccgaacgatacgcatcaaaatgtagctattagccggcgaaaaaggagcgcgcaatgaagttctggcgacccggtattaccggcaaactgtttctggcgattttcgccacctgcattgtcttgctgatcagtatgcactgggcggtgcgtatcagttttgagcgtggctttattgattacatcaagcatggtaatgaacagcgattacaactgttaagtgatgcgcttggcgagcagtatgcgcagcatggcaactggcgcttcctgcgcaacaatgatcgctttgtctttcagatcctgcgtagttttgaacacgataatagcgaagataaacccggcccgggtatgccaccgcacggctggcgtacccagttctgggtggttgatcaaaacaacaaagtgctggttggtccgcgagcgccgattccacctgacggtacacggcgacccattctggtcaacggtgcggaagttggcgcggtgatcgcctcccccgttgagcggttaacgcgcaatactgatatcaatttcgataaacaacagcggcaaaccagctggttgattgtcgccctggcaacgttactcgcggcacttgccacttttctgctggcgcgcggtttactggcaccggtaaaacgacttgtcgatggcacgcacaaactggcggcgggcgatttcactacccgcgtaacgcccaccagtgaagatgaactgggcaaactggcgcaagacttcaaccagcttgccagcacactggagaaaaaccagcaaatgcggcgcgattttatggccgatatttctcacgaactgcgtacgccattagcggtgctgcgcggtgaactggaagccattcaggatggcgtgcgtaaattcacgccggagacggtggcgtctttacaggcggaggtcggtacactgaccaaactggttgacgatctccatcagttgagcatgtctgatgaaggcgctctcgcctatcaaaaagcaccggtagatttgatcccactgctggaagtggcgggcggcgcatttcgcgaacgattcgccagtcgtggcctgaaactgcaattttccctgccagacagtattaccgtatttggcgatcgcgaccgtttaatgcagttattcaataacttactggaaaacagcctgcgctacactgacagcggcggcagcctgcaaatctctgccgggcagcgcgacaaaacggtgcgcctgacctttgccgacagtgcgccaggtgtcagtgacgatcagctacaaaaattgtttgaacgtttttatcgcaccgaaggttcccgcaaccgtgccagcggcggttccgggctggggctggcgatttgcctgaacattgttgaagcacataatggtcgcattattgctgcccatagcccttttggcggggtaagcattacagtagagttaccgctggaacgggatttacagagagaagtatgaccgagttaccaatcgacgaaaacacaccgcgtattttgatcgtggaagatgaaccgaagctggggcagttgctcattgattatctgcgtgctgcgagctatgcgccgacgcttatcagccacggcgatcaggtactgccgtatgtgcgccagacaccaccggatctgatcctgttagatctgatgctccctggcaccgatggcctgacgctgtgccgggaaattcgtcgtttttctgacattccgatcgtgatggtgacggcaaaaatcgaagagatcgatcgcctgctggggctggagattggcgcagatgattatatctgtaagccgtacagcccacgggaagtggtagcgcgcgtcaaaaccattttgcgccgttgcaaaccgcagcgcgagttgcagcaacaggatgctgaaagcccgttgattatcgacgaaggtcgttttcaggctagttggcgcggtaaaatgcttgacctgacgcctgcggaatttcgtctgctgaaaacgctctctcacgaaccaggaaaagtgttctcccgcgagcaattgctcaatcatctttatgacgactaccgcgtagtaaccgaccgcaccatcgacagccacattaaaaacctgcgccgcaagctggaatctctcgacgccgaacagagttttatccgcgccgtttatggcgtcggttaccgctgggaagccgacgcctgccgcatcgtttaattttagcgacattattttgttagccggagatggcgttcagaccagatccggcaacattatcccacgcatggtcagcaaactgacattatctctccgccctggcaggcatcagaaaatcgctcatactttaatcggtaaacagcacctttagaatcctgtcgtttgttttcgatttcaaaatataatgaaattatttgtttttaaatatcgagataacgatcacaaaaacgacaatatgaaaattattcgaggagtgaaaggcaaaaaaacggcctcccgatagggaagccgtagcaaagtgcgcgtgtttttatgccggatgcggtgtaaacatacgtggcagtgctatgtaggcatgataagacgcttcagcgtcgcatcaggcataggttgccggatgcagcgtaaacgccttatccgtcctacggggtggtgttgttcgtataaggcgtatcaggcgatagtaattttgctatcgagataaacgtcctgcacggcgttaatcagtttcacgccgtcagccatgcttttcttgaacgctttacgtccaagaatcagccccattccgcctgcgcgtttgttgataaccgcagtacgcactgcatcgctgaggtcagtttcaccgcccgcagcaccgccggagtttatcaacccagcccgacccatatagcagttagctaactgataacgcaccagatcaatcgggttttcgctggtcaatttgctgtaaacacgatcgtcggtgtaaccgtaattaattgctttatagccgccgttattttccgccattttttgtttgacgatatctgcaccgatggttgccgccagatggtttgcctgaccggtcaggtcggcggaaacatggtaatcaacgccatctttcttaaaggcggagttacgcaaataggcccacagcactgtcaccatacccagctcgtgcgcacgttcaaaagccgcagaaatttcttcaatctggcgacgactctcttcgctgccaaaatagatagtcgcaccaaccgcaaccgcgcccatgttgaacgcctgctccacgctggcatacagcgtttgatcgtaggtattcgggtaacttagcgtctcgttgtgattaagtttgacgaggaatggaatgcgatgcgcataacgccggcttacgctcgccagcacgccgtaagtactcgccacacagttacagcccgcttcgatcgccagttcaacaatgtttttcgggtcaaagtagagcgggttagcagcaaaactagctccggcagagtgctcaacgccctggtcaaccggcagaatagaaagatatcctgtgccagccagacgcccggtgttgtacaacgtctgcatattacgtaacaccgctggcgggcgattattgtcaatcattacgcggtctacgtagtcatgtccggggagataaagctggtcagaaggaattgtcatacaacggtgctgtaaaaggttgtcggcgtctttgccaagcaactgcgcaatatctgtcattactatgctcccgtaaattccgattggatatcggctatggattgtcctggcccgccttttgcgggcaatcataatcctggtcgttacgggcgagtttttccatcttttggatgttttttcagcgttttctgttggctcgattcatcagaaaaaatgttagcgcggtcaagttttcaccgcaaaggtatttaaaaggtattattaagtggtattgtcatcgcgtaccttacattacctgtcatgaaggaattaaaagatgaaaacaacagcaaagctgagcttcatgatgtttgttgaatggtttatctggggcgcgtggtttgtgccattgtggttgtggttaagtaaaagcggttttagtgccggagaaattggctggagctatgcctgtaccgccattgcggcgatcctgagcccaattctggttggctccatcactgaccgctttttcagcgcgcaaaaagtgctggcggtattgatgttcgcaggcgcgctgctgatgtatttcgctgcgcaacagaccacttttgccgggttcttcccgttactgctggcctacagcctaacctatatgccgaccattgcgctgactaacagcatcgcttttgccaacgtgccggatgttgagcgtgatttcccgcgcattcgtgtgatgggcactatcggctggattgcctccggtctggcatgtggtttcttgccgcaaatactggggtatgccgatatcagtccgactaacatcccgctgctgattaccgccggaagttctgctctgctcggtgtgtttgcgtttttcctgcccgacacgccaccaaaaagcaccggcaaaatggatattaaagtcatgctcggcctggatgcgctgatcctgctgcgcgataaaaacttcctcgtctttttcttctgtagtttcctgtttgcgatgccactagcgttctattacatctttgccaacggttatctgaccgaagttggcatgaaaaacgccaccggctggatgacgctcggccagttctctgaaatcttctttatgctggcattgccgtttttcactaaacgctttggtatcaaaaaggtattattgcttggtctggtcaccgctgcgatccgctatggcttctttatttacggtagtgcggatgaatatttcacctacgcgttactgttcctcggtattttgcttcacggcgtaagttacgatttttactacgttaccgcttacatctatgtcgataaaaaagcccccgtgcatatgcgtaccgctgcgcaggggctgatcacgctctgctgccagggcttcggcagtttgctcggctatcgtcttggcggtgtgatgatggaaaagatgttcgcttatcaggaaccggtaaacggactgactttcaactggtccgggatgtggactttcggcgcggtgatgattgccattatcgccgtgctgttcatgatttttttccgcgaatccgacaacgaaattacggctatcaaggtcgatgatcgcgatattgcgttgacacaaggggaagttaaatgaaaacagaacgtattctcggtgctctttatgggcaggcgttaggggatgcgatggggatgccctccgagctttggccacgcagccgcgttaaagcacactttggctggattgaccgttttcttcctggaccaaaggagaataacgcggcctgttattttaaccgcgccgaattcaccgacgataccagcatggcgctgtgtctggcggatgcgttactggaacgtgaaggcaagatcgatccggatctgattgggcgtaatattctcgactgggcgctgcgtttcgacgcctttaacaaaaacgtactaggtccgaccagcaagattgcgcttaacgccattcgcgacggtaaacccgttgctgaactggaaaacaacggcgtgaccaacggcgcagcgatgcgcgtcagcccattaggttgtttgcttccggcgcgtgatgttgattcctttattgatgatgtagcgctggcgtccagcccgacccataaatccgatctggcggttgcaggcgcggtagtcatcgcatgggcgatttctcgtgccattgacggagaaagctggagtgcgattgttgattccctgcctagtattgcgcgacatgcacagcaaaaacgcatcactacgttcagcgccagtctggcggcgcggctggagattgcgctgaaaattgtgcgcaatgccgacggcaccgaatccgccagcgaacagctttaccaggtcgttggcgcaggtaccagcactattgagtccgttccgtgcgccattgcgctggttgaactggcacaaaccgacccgaatcgctgcgccgtcctgtgcgctaaccttggcggcgacacagacaccatcggtgctatggcgacggcaatttgcggcgcgttgcatggcgttaacgctatcgatcctgcgttaaaggcggaactggatgcggtaaatcagcttgatttcaaccgctatgccacagcgctggcgaaatatcgtcaacaacgggaggcggtatgagcggcgctcgattacacacgctgctgcctgaattaaccacgcgtcagagcgtgatggtcgtcggcgcggcggtcattgacgtgatcgccgacgcttatgccctcccctggcgtgggtgcgatatcgaactgaaacagcagagcgttaacgttggcggctgcgcactgaatattgccgtggcgttaaagcgcctcggcatcgaagcgggtaatgccttgccgctcggtcagggcgtgtgggcggagatgattcgcaaccggatggcaaaagagggcttaatcagcctgatcgataacgccgaaggtgataacggctggtgtctggcgctggttgagccggatggcgaacgcacttttatgagtttcagcggtgttgaaaatcagtggaatcgccagtggctggcgcgattaaccgttgcgcctggcagcctgctctatttttccggttatcaactggccagcccctgcggcgaattgttagtggaatggctggaagagctgcaagacgtgacgccgtttatcgattttggcccacgtattggcgatatcccggatgcattactggcgcggatcatggcctgtcgacctttagtgagcctcaatcgtcaagaggctgagattgccgccgaacgttttgctttatccgcagagataacaacacttggcaagcaatggcaggagaaatttgccgcgccgttgatcgttcgtctcgataaagaaggcgcatggtatttcagcaacgacgcttctggctgcattccggcatttccaacgcaagttgtcgacaccattggggcgggcgacagtcatgccggtggcgtacttgccgggctggcctctggtctgccactggcggatgccgtattactgggcaatgcagtggcgagctgggttgtcgggcatcggggcggtgattgtgcgccaacgcgcgaggaactactcctcgcacacaaaaacgtataattactcctcgcacacaaaaacgtatagatcgctgcgacagtggctaatgctgtactcaataggccgttgctgttggtcaagcgccacttgcttgatcaccagcaccggtattttgctatctaactgaatatgactctgaaactcggcatccggcatccgggcgctaacgcgggaacgcgtacgttgtgggtaaatgtgctggctgcggaaatagtcataaagactaatcccgatggcatcaacatcatgaattaaatgcgccggaacccagctttcctcaatgcttaccgcttcttcatcgacatagcgaatacgcttaagcaaaaagacatcacttcctgcttcgaccgccagctgctgcgcgacttcttcgggacatttcacgacacgcttgttaacccatagcgtatcgggctttttcccgcgcaataccacctgctgagaaaaacctcgcgcttctttcaagctgtattcgaagatgttgttgatctgcgtgccgtaaccgcggctacgcgtcaccacaccctcttcttccagcgcctgcatcgccttgcgcaccgtaatgcggctaacgccggttaactgacttaaatcacgttcaccgggcaaaatattgccatgctccagcaccccgctgcgcacggcattttttaccgtttcggcaaacttaatataaagcggcgtgttatccgccgctaaaatacgctcgttcagttgggcaatcagctgggtatgcgcttgttccatttgtctttttcctgccggggagtctggtgggagtatatcactgcttcttatttaaggcgtttctttaatcccatcaacgaatgcctgcaactcctccaccgtgccattaaatacattaaaatccaccggaccattgatgccatctacctgtccacggtcggaatgctgccagaagcgccaggccattccgtcattgtccggacgacgttgatagtagtgagccacccaccacggatattcattgaaatagcccgccagattggtgtgataaaaaacggctccactgtaaataatcggctttttccccgtacttttttcgaccatttttagccactgacttacccgcttgcgtaattcttttgcgcttaattttccccgttcttctacgtccagcacggcagggaaatcgccttgactgaaatccaccgtttgcagaaataatctcgcctgaacactagcggatacgctcggggagaaataatgatacgccccacgcagcaggccattttcgcggcttagttgccagttacggctaaaataggggtccaccagcttttcgccttccgtcgccttaataaaagcaaactgtaagcggataccattgtcgcgcatttttgccacccgctgccagtcgatccgctcctgccagcggctaacatctattccgtgaatggtgtaactggcaggaatgcgaatagcgaaagatttaaccgggcgataaccgtagaagtggatgtagtctgtaatctgaactgctgtgctatagaaaaaattcaccgtctgacgcggataaattgcaacgatggaaattagcccaagagcgcataatagagaggtgagtttttttcgactggtaattcttagctgcattggtttcatccctgaatgtcagtgccaaaggctgacaataaccaaagcagctatagtacggcgctcaccaccaggcgtggaagtggtgaaccggaccaataccgtgaccaacttccagcgtgtcggcctgggctaacgcgctactaagccagctttttgcctcctgtacggtgtcagcccagtttgtatggcgcgggcgtagtgcagccaacgccgcagagagtgtacaaccagtgccgtgggtgtttttggtcataatgcgcggtgcggtaaaccgttgttcaccctcgcgggtaaacagccagtccgggctttgctcatcatccagatgaccacctttcattagcactgcgccacagcccatcgccaacaggcttcgcccttgttccagcatttcctgttcggtgcgcgcgtgtggcgcgtcgagcaaggcggcagcttcgggcaagtttggcgttattaaactaacctgtggcaataatcgactgcgcagcgtagcaaccgcgctaggactaagcagcgggtcgccgctttttgccagcataacggtgtcgagtaccacgttttggatctgataacgttgcaaccgttctgccaccgcttcaacaatatcggtttccgccagcataccgattttagtggtatcgattcgcacatcgctgaacacgctatcgagctgggcggcgacaaaatcaggctcaatgcgatacacgctctgtacgccacgggtattttgcgccaccagtgcagtaataacactgcaaccataagcgccaagtgcgctgaaggttttaagatcggcctgaatccccgcaccaccactcggatcagtaccggcaatcgtcagagcgttaattcgtttcatgcctgcacctcctgcgtcaattgccagagcgcatcaaggaaatgtggaacaaaactgcctggcccctcgcttctggcgactgcgcgttctccggcttgtttcatccagtgacaggcagatgcgacattttccagcgtatcgcctggtaacgcacagcaggcagcgacaaccgcgcttaatgcacagccagttcctaccactttggtcattaacggatcaccaccgtgaataccaatgatacgatgtccatcggtaacataatccatctcgccagtgaccacgacgattgcgccagtttcccgtgccagtgtttgtgcagcgggtatcgcgttagctgcggcgtcagtggtatccactccccgtccgccattagcaatgccagctaatgccatgatttcgctagcattaccacgtatcgctgccggtttaaaagataaaagttcatgacaaaaatggcggcgataatcgagcgcacccaccgctactggatcaagcgtccagggtgtttgagagctttttgcttgctcaacggcagcacgcatcgcctgagcgcgtggctgcgtcagtgtgccaacgttaatcaacaaggcactggcgatagccgcaaactgactggcctcttcggtttcgataaccatcgctgggcttgcaccgagcgccagcaaggtattggcggtaaaggtttgcaccacatcattggtcatgcagtgcacaagaggggaatgttggtgaaaaaggtgtaacgcgtgcgcagattgcgcactacccagcaggtcgacttgcatagtttgctcctgccataacgtgaagaagcaatgacctggtggtccgtgacttccctacgctggcattatccagatcaggtgatacgggtatttctcagccttcacgcagaagggcaccccgagtcgtttggttgcgatgataaatcgcagaggaggatggtaatgtccagcgcacgcgttgtaaacgaggaaaaacggcagttttacaatcgcgttaataaattatttgatataactatccagcaccttcagaacgacatccagatcttcttcacgttttagctcatccccctggtgaacgatgtgttccgtcagatgacctttaatcacttcccgcatcagaccgtttaccgcgccacggatagcagcaatctgttgtaaaactgcagcgcattcgtgcggctcgtcgagcattttcttgagcgccacgacctggccctgaatcttactggcacgcgctttcagtttctgtttatcacggattgtatgagacatggcaacacctggttaacaagaatatgaaaaatcatagcactattaatctactggggggtagtatcaggtactgggggggagtagaatcagattgccgaattaatactaagaattattatcatgaccgaatttacaactcttcttcagcaaggaaacgcctggttcttcatccccagcgccatcttacttggtgcgcttcatggcctggaaccagggcacagtaaaacgatgatggcggcgtttatcatcgccatcaaaggcaccattaaacaagcggtgatgctcggactggcagcaactattagccataccgcagtggtctggttaattgcctttggcgggatggtgatcagcaagcgctttactgctcaaagtgcagaaccgtggctccagctgatttccgcagtgatcattattagcaccgcgttctggatgttctggcgtacctggcgcggcgaacgcaactggctggagaatatgcacgggcatgattatgagcatcatcatcacgatcacgaacatcaccacgaccatggacatcatcaccatcacgaacatggcgagtatcaggatgcccatgcacgagcccatgccaatgacattaaacgacgctttgatggtagagaggtcaccaactggcaaattttgttatttggcttaaccggtggccttatcccctgcccggcagcaattaccgtgctgttgatatgcattcagttgaaagccctgacactgggcgcaacactggtcgtcagtttcagcattggcctggcgttaacgcttgtcaccgtaggcgttggcgcagcaatcagcgttcagcaggtcgcaaaacgctggagcggatttaacactctcgctaaacgcgccccctatttttccagtctgttgattggcttagtcggtgtgtatatgggcgtacatggcttcatgggcataatgcgataactcaatcctttaggcttgcatgttatcttcagcccaggatgattcttaaatcagctatttccgctgactctctgctcgctaaggatgcttttagggcatcctttcatttacactttttacgaaatcatgggatcactaacaaaatatcgcttgtcagttatattgtatggcaggaaagatatgcgactgatattacagatccccaaagtggagagtttatgaccattaaaaataagatgttgctgggtgcgcttttgctggttaccagtgccgcctgggccgcaccagccaccgcgggtagcaccaataccagcggaatttctaagtatgagttaagtagtttcattgctgactttaagcatttcaaaccaggggacaccgtaccagaaatgtaccgtaccgatgagtacaacattaagcagtggcagttgcgtaacctgcccgcgcctgatgccgggacgcactggacctatatgggtggcgcgtacgtgttgatcagcgacaccgacggtaaaatcattaaagcctacgacggtgagattttttatcatcgctaaaaaaagccccctcatcatgagggggaaatgcagacaccttgttattttttattattagccacttgctcgtcttgcttgttattagtcgtatttcacgttgattaatgcggttgcctccagtgcgccagatttaactttgtttgtatcgtagacgtagtaactggctgttatcggaatactaaccgttgtatctgtaagtttactcttcgccgcaacttcctttaaatttgtatatcctttactgctgttagtgatatttaaaagtgtgactgggctaccattactttcaagaataaatcctacgccattatcttccgcacctttcagtattgtgttgctgttggttaacaagtcagaactacttaaatacacctgcattttccgacttgtttgattttgttgacctaataaatttttacaacgcagaataatatccccttgtttactatttattgttgctttgttacctgtggctggtaattgactaacgggaatactgtctaaagtaattaataaatcgtccggtttgcaggttgtggttatcgggttgtaactcaatgtcagattaaaggaatagacacctgcattttgtgccaatgcatttctgtagctatttacacatgcatcccaactcttgccacctaataaacacagtagaaattgtactgcggcactcccgcgtgtgctactactagcactggataatgtcgcaacaccattaatcatcacactaccgccgccccccgcagaaacattcacttttgcattactggccgcaggtgtcaccgtaacactataaccactggtgaaactggtctgattattactcaacgtgatgttgtttttattggtccattcaaaatgtaaatttaattttatggtatcgttataaagtccaacaataatatcgctcgggctcataggggtgatagtatttgtacttacgcaactgctatcattaaaattatgctcatatgtcgccatttgtgtttgagtaagtgcaaaatccccctgaacaaccaagttgtgctgaacagataactcactataacatgccgcatagctcacaggcataaccatcatcattaatataaatagcattatgcgaatttccatagaaccacctgactattactggcaaatataatttctactttcatcaatctctttaccgaaggtgattgtgcaactaagtccttgttgcttatcaattgccacattaacgcttggcggtacttcattggtgcgaataaataactgacttccctggccgacaacgccaatattatgaccatggatatcattgacttcataaccaaacgttaaactttgcccatctgctcttaacgcttttataaaccatggcttgcgctgatcggtatcaaaattaaccagtacaaccgcgccgcgataaggggcggcaattttccggttgccacgtaattctgcttcgctatcgctttggctcacatccagcatcaggtgattttcccgataaggtgtcattccgtcgtatatcaccactccattacggtttgttgtgcgatatttttgcccattgacataagcatctttaattcctggcgcattcatcacagcaaacgtttcggaaagacggttcgccagattaacgccaccgctccaggcgacaatgcccccactaacactggctccagcctgtcgataagtactgctctgactataactgccattcactgtcgcaaccggcgcgttccaggtcaaattcgccccagctgtcgtttcatttccctgatgttgatgactcaggttgacaccataattgaactgatcccgactccctactgttccacttaatcccgtattattactggcaaacccctgatcatcaaacgtcgtactgttagacatatatatttgccgacgaggcgtgctaacgtcatcaccccaatcaaagggaatgcttataaaaatattaaaacgtttctcttcatgatgattctcgtcataagcctggcttgccgcgagggtatagcttatccgtcgcaggttgttggaataactcaactgataatccttactactgccgctacgcccccagtaatctcgccataacgtacttaaactcacagacccccaaccttctggcaaactctggctcatattggcggaaaagctatttttgcggccaaaatcgttctggtaataatcggcaatgtcatagacatcgttttcatcacggcgataattatctttattgtttgcccaaacgtgatcgttaaatgtccggtaatcacggctgctataacgccaggccgccagaccaaaacgcgtgctcgtttggctcacaaatttgttgtaggcaatttgataactttgcccgtcaaacacatcgccgttgtcttgtttactatggctcttagtggcatcgacggaaatggcaccaatgcgtgtattccagccagcccccaaagtaaacgcgtaataattattcgcgaccatgctgccaccatacagcgtcaataaattattaaaaccatactgataacccgcctggacaaaatcactttgtttgctcgccccttcaatatggctacgacccgccgctaaatcatatttgctcacgccgggttgcagcatatttggcaccgctgcataaggcaccagataggtggttacgctgccgtccgcctctttcacgctgacatcaagatctgctccaccaccggccaactgcaaatctgtaatcgcgaacgggccaggaggaacctctttctgataaaccacaaaaccattctgttcaatagttaccagcgcgttactctgagcaatcccctgcacccgtggcgtaaaattttgtttgctgttaggcaacatctgcatatcacgaaacaaccgcacacctctgaagcgaacagaatcaaaaatatcgctacttgtgtacatatcacccacgcgaagcgtgccgagaagttgggcaaatccacgttccagatacagggtattgcttttccacacccctggattgttatttgttttactgaaactggcatcagaatgcagttgccaccccagtaaatttaacccgctgttaaaacgtacatatgtactcttgttattaccgctcgctttatagtcgctgtaatactgactcagataataagaggtataaaacgcattaataccccgctcccagttttccggtggaacatagccactttccagttcttccacccaggcctgcgggacactgaaatcgagacgaaaaaccccgatatcccaggtatagctcccaccctgaacaagttgctcaaatgttaaacattgcttaccgctggcgaagttatcgctattaatgcctaaccgcttgataacttctctacttaaacatgtttcttgcgggttgtctttaacaataatctcatatttcccgcgccattgcttattgacataaatatcgatgtcatactgccccggtaagggttgattatcatcaagacgaatatttgcaacctgctggtctttcattccacctatcataaaatgggtatcaaaggtttcttcagctgcataagcttcaatgccgagcaataacgctacgattgcacttgcaagtggggtcattctcaacataggcagctcctgcaattaaattttgtcactaatatagttgccatggtcatcgataatggtcagatgccagttatttgcattattacttttgacattaacactctgactttctaagggggcaatcataatagtttcataattgactttgacattattagctttgacatcgctaatcgtcacccaattagcactgtcattttttatcaccaaaccattgccactgcgatttaccagcaattttttaaatgtcgctttatttaccggagcaatacccgctggccggtaaaacaacttaattctgttttgcatcgcaaacttcagtgcattcttaccttcttgctctggactatttggtggaatatccagaacattcagataaaaaatgctttctttattagtgggcagtttattcggcataattttgatttttacttgctgcccggaatttgcccctatttttgccactggtggcgttaacatgaaaggaacctgaattttttctggtggtaaactcgtatcgccatcatcaatccacgcctgcagcaggctagaacggtttccctggttcatcaactgcaccatcacttctttattttctgccgggtaaataatgcgcgtcccgtagataacaattccggcatgtgcaggaaggaccatagaaaaaatgagtaaagataataatcctttcattttaatgcctcttaaattaaaaggccgccatgggatagcggccatgtttattacctggagaaacttacaattttatttattaatcctgcgccacacgcataaccagagaagataacacatcaccactttgcacactgttatctgtcagtttcaggtattttgctttaaacggaatagcatattgaccttccgctgttttataactctcaatgttaaaaggtgcagaaacatccaggacatcgctgttatcacctaaatagagatagtaacccacggtatcgttgctactggctatcgccttatcgttaccggttattttatcgttggtaatcaagctgagttttacaccagcaacttctttcgggcagctaatttttaacatgctgctggttacaccgactgcatcatcataggtagaatatttagctttaccttcaaagacactggttggtacagtcggcatattaatacttacactatcaccacccgcttcgaatttacacggagattctgcaatattccccttaatagttaatgttccggtatcaacgtctgcagcaaatactccagcgctcataaaaaaagaagaaaagacagcggcagcaataatactacgtttcataatatgttccttaataaaatttatttttggttgttaagagtctgtatctcttggaaacaaatttctcacatcaaaaaagttgccgcaatgtaaacacattgttttattgatttaaaacaaattaaccattgcaatataaatacaaaaaatatttaagagtattaactatttatcgcatctatcaattaatgtagatttatgtaaatggtattgttgatatcaataaaaaagccgaaatcatttatataaatgatttcggctttctaaatgcaattaaaatcaggttgccaaattaatcgtagcgatttaacacgattcgacgtttgctatcgctacctgcaacaaccacttctgtcgttacacctttgacggggctagaaaacagatgacgggtgtcaacattatacgttaactgaccacaatgctgttgaggttgaccattaaccatagccatactgcatgttgggggactgatcctgccattaatcgctaatgtggcagtctcactagagaatgcgggagaagccaatccataggcaagaaaaataattccactcagccaatacttattcattgaacgttatccctgtagtaaaggttatgcctggatagaatgagtgcataacaaactatagctgtacatccactacacagccacgaaggatgataatgaagcattgcctgtatgatcaatcgactttgtagagtttcggacgaaggtccgcagaatattcgcagtattaaataagtgttcattaatgcggcaaaaactaatacaccgcatcaatgtaacatctctgcggtgtatgaagaataaccagaatggttaataggcgttagaccgcgcggaaggaaatctcgcctggaatgacttcaccctgccagtagagctgagctgcaacgcggtcagccagctggcggtagatagcggtaaattcgctctccggacggctgataaccgttggcgtacctttatcgagatcctcacgtaaggagatgtgtaacggcatctgccccagcagctgtgtatggtatttttcagccagtttctctgcaccaccggtaccgaaaatcggttcatggtgaccacagttactgcaaatatgcacactcatgttctcgacaataccgagcaccggaacctcgactttctcgaacatcacaatgccttttttcgcatcgatcagcgcgatgtcctgcggggtggtgaccacgactgcaccggttactggaatgttttgcgccagcgtcaattgaatgtcaccggtgcctggcggcatatcaagcaccagatagtcgagatccggccacaaggtttcctgcaacatctgcattaacgccttgctcgccatcggtccacgccacaccatcgcattgtcgtcagtgaccagataaccaatactattggttgccaggccatgagacataatcggtgccatatgggtaccgtccgggctagttggacgctgattttctgcgcccaacattgttgggatacttgggccgtagatatcggcgtccagaatgccgactttcgccccttctgccgccagcgccagtgccaggtttaccgccgtggagcttttacccacgccgcctttaccggaactcaccgcgataatgttcttcacaccgttaattcccggctgattcttcacgcgtttcagagtggctatgttatggctcagtttccagtcgatagctttcgccccggtgatgcgcagcagttcggcgctacattgctcttttaactcttcgaacgcgctatgccagacaaacggcataaccagttccacatgcaacgtgtcgtccatccaggcgacatggtgcaacgctttcagcgtggtgaggttatgcttcagggttgggtgctgaaaattggccagtgtcccggcgaccattgcgcgcaaggcttctggacttttggcctgggattgttcgttcatcccgactccttttttgtatagataaaccatcagctgatagtttacctgaagaatatagagaagtacttacttaacattttcccatttggtactatctaaccccttttcactattaagaagtaatgcctactatgactcaagtcgcgaagaaaattctggtgacgtgcgcactgccgtacgctaacggcagtatccacctcggccatatgctggagcacatccaggctgatgtctgggtccgttaccagcgaatgcgcggccacgaggtcaacttcatctgcgccgacgatgcccacggtacaccgatcatgctgaaagctcagcagcttggtatcaccccggagcagatgattggcgaaatgagtcaggagcatcagactgatttcgcaggctttaacatcagctatgacaactatcacagcacgcacagcgaagagaaccgccagttgagtgaacttatctactctcgcctgaaagaaaacggttttattaaaaaccgcaccatctctcagctgtacgatccggaaaaaggcatgttcctgccggaccgttttgtgaaaggcacctgcccgaaatgtaaatccccggatcaatacggcgataactgcgaagtctgcggcgcgacctacagcccgactgaactgatcgagccgaaaagcgtggtttctggcgctacgccggtaatgcgtgattctgaacacttcttctttgatctgccctctttcagcgaaatgttgcaggcatggacccgcagcggtgcgttgcaggagcaggtggcaaataaaatgcaggagtggtttgaatctggcctgcaacagtgggatatctcccgcgacgccccttacttcggttttgaaattccgaacgcgccgggcaaatatttctacgtctggctggacgcaccgattggctacatgggttctttcaagaatctgtgcgacaagcgcggcgacagcgtaagcttcgatgaatactggaagaaagactccaccgccgagctgtaccacttcatcggtaaagatattgtttacttccacagcctgttctggcctgccatgctggaaggcagcaacttccgcaagccgtccaacctgtttgttcatggctatgtgacggtgaacggcgcaaagatgtccaagtctcgcggcacctttattaaagccagcacctggctgaatcattttgacgcagacagcctgcgttactactacactgcgaaactctctagccgcattgatgatatcgatctcaacctggaagatttcgttcagcgtgtgaatgccgatatcgttaacaaagtggttaacctggcctcccgtaatgcgggctttatcaacaagcgttttgacggcgtgctggcaagcgaactggctgacccgcagttgtacaaaaccttcactgatgccgctgaagtgattggtgaagcgtgggaaagccgtgaatttggtaaagccgtgcgcgaaatcatggcgctggctgatctggctaaccgctatgtcgatgaacaggctccgtgggtggtggcgaaacaggaaggccgcgatgccgacctgcaggcaatttgcagtatgggcatcaacctgttccgcgtgctgatgacttacctgaagccggtactgccgaaactgaccgagcgtgcagaagcattcctcaatacggaactgacctgggatggtatccagcaaccgctgctgggccacaaagtgaatccgttcaaggcgctgtataaccgcatcgatatgaggcaggttgaagcactggtggaagcctctaaagaagaagtaaaagccgctgccgcgccggtaactggcccgctggcagatgatccgattcaggaaaccatcacctttgacgacttcgctaaagttgacctgcgcgtggcgctgattgaaaacgcagagtttgttgaaggttctgacaaactgctgcgcctgacgctggatctcggcggtgaaaaacgcaatgtcttctccggtattcgttctgcttacccggatccgcaggcactgattggtcgtcacaccattatggtggctaacctggcaccacgtaaaatgcgcttcggtatctctgaaggcatggtgatggctgccggtcctggcgggaaagatattttcctgctaagcccggatgccggtgctaaaccgggtcatcaggtgaaataatcccccttcaaggcgctgcatcgacagcgccttttctttataaattcctaaagttgttttcttgcgattttgtctctctctaacccgcataaatactggtagcatctgcattcaactggataaaattacagggatgcagaatgagacactttatctatcaggacgaaaaatcacataaattcagggcagttgagcaacagggaaacgagttgcatatcagttggggaaaagttggcaccaaagggcaaagccagataaaaagtttttcagatgctgcggcagcggcaaaagcggagcttaagctgattgcggagaaggtgaagaaggggtatgtggagcaagcgaaggataattctttgcaaccttcccaaacggtaacgggctctctcaaggtagcggacttatccaccattattcaggaacaaccctctttcgtagcagaaacccgtgcgcctgacaaaaatacagatgctgttttaccgtggctggcgaaagatattgctgtcgtttttccgcccgaagttgtacacaccacgttaagtcatcgccgctttcccggagttcctgttcagcaagcagacaaattgccccaattacgtcgcttagcctgtagtgtgtcgcaacgggataataaaacagccacatttgacttcagcgcctgttctttagaatggcaaaacaccgtcgcccaggcgatcagtcagatcgacggcctgaaaacaacacagttaccatcaccagtaatggctgtactcacggcacttgaaatgaaatgcacaagatataaagtgcgtgaggatgttatggatcagatcgtccaggaaggcggtctggaatatgctactgatgtaataatacaccttcaacagattgatattgaatgggattatgcgaataatgtcattattattctgccgtctggcattgcacctagctacttggagcaatattccagatttgaatgacgcctacgtaaacatttatcactgacggaagagtctctctggcaaaaatgtgcacaaaaacttattgccgcaattccacatattccagaatggcggcaaccattaattgctttgttattacccgaaaaaccagaaattgcacatgaaattgcccagcgtctactggggcaaaaaaaattaccctcgcttgagtggttaaaaatagtggcgactgatgagcacattcttgcctcattagaaaaatatcacgaaccatatgccatttttgatgattactattgtggtgcgatatggtcagccaccgtattacaggagcaaggtgttgcagccctgccccgatttgctccctatgccgcaagtgactactgcgccgatgtgttgcgtcatatcaatcatccgttcgcattgacactgcttatacgtgtagccgggcaaactaaacgctgtcacgatcggatgacgaaagccattgctgcgttcccacatgcagcaatggcggcactgacggaacttcttgggcaaaaagaagagaacagttggcgcattatgctaatgacaatgcttatctcacaaccagcactggcagaacaggtcattccctggctctcgacacccgcagttgccgtactgaaatcatgccagcaacaactgacacagccctcaaaccatgccagcgccgatctactgccagccgtagtagtctcccctccctggctttcgaaaaagaaaaaatcgccgattccggtgctggatttagcgccattaggcattgagccaatctgttatctgacagaagaaatcagtaatcaacttttggcgaaatatatctggtattcaaaacacatcacggttagccatgaagaaagtactaccaacctgttggcaaggatgggttttcaacgacggatcgctggtacatatattaaagctcccgaagcggtagttgaggcatggctaaatgaagattattcaaccttactaagtgaatttaaggtgtttcattcacctaccgggcattattggcagttggggattttgacaacattgccgctggagaaagcagtaaaagcatggaatgcccttaccctatctccacataccgataccgaatactccatgttacattttggactcaaagggttacctgggttagtaaactcacttgcacgctatccacaagaagccttgcccatcacgaattacttcgcagcgagtgagctggctcctgccgtcgcccgtgccttcaacaaactgaaaacgctacgcgaaaacgcccgtagctggctgttgaaatacccggaacatgcccttaccggcctgctgcctgcggcgctcggcaaagccggtgaagcacaggataacgcccgcgctgccttgcgtatgcttaccgaaaacggtcatcagccattactgcaagaaatcgcccgacgttataaccagccggaagtaaccgatgcggtgaacgctctgcttgcgctcgatcccttagataatcacccgacaaaaatccccactcttccggccttttatcagccatcgctctggacgcgcccggtattaaaagcaaatgcccaatcactgccagatagcgccctcctccacctcggtgaaatgctccgcttccctcaggaagaggctctgtatccgggattattgcaggtgaaagacgtctgttccgccgactcactggcgggatttgcctgggatctgtttaccgcctggcagaccgctggcgcgccgtcgaaagagagttgggcgttcactgcgttaggcgttctcggtaacgatgacaccgcccgcaaactgacgccattaatacgcgcctggcctggtgaatcccagcataaacgcgccaccgttgggttggatattctcgctgctatcggtagtgatatcgcccttatgcagcttaacggcatcgcccagaaactgaaattcaaagcattacaggagcgggcaaaagaaaaaattgccgacattgccgagagccgcgaactcacggtggcggagcttgaagatcgggttagcaccggatctcggtctggatgataacggttcgctgctgctggattttggcccacggcagttcaccgtcagctttgatgaaaccttaaaaccgtttgtgcgtgatgtttccggcagccgcctgaaagacctgcccaaaccgaacaaaagcgatgatgaaacgcgggcgaacgatgcggttaaccgctacaaattgctgaaaaaagatgcgcgtaccatcgccgcccagcaggtagcaaggctggaatccgccatgtgcctgcgccgccgctggtcgctggaaaacttccagctcttcctggttgagcatccgctggttcgtcacttaacccgccgtctgatttggggcgtttatagcgccgaaaaccagctactggcttgctttcgcgtagcagaagataacagctccagcaccgctgacgatgatcttttcaccctgccggaaggcgatatctctatcggcactcctcacgttctggaaatatcaccaacggatgctgccgcctttggtcagctttttgccgactacgaactgctaccaccgttccgccagctcgaccgtaacagctacgccctgacagaagccgagcgcaatgccagtgaactgacccgctgggcaggcagaaaatgcccgagtggtcgggtcatggggctggcgaataaaggctggataaagggcgaaccacaggatggaggctggatcggatggatgatcaaacctttgggtcgctggtcgttaatcatggaaatcgatgaaggctttgcggtaggcatgtcgccagccgaactcagcgctgagcagctcttaagcaagctgtggctatgggaaggcaaagcagaaagatatggctgggggagtaattcaacacaggaagcgcagttctccgtaatcgatgccatcaccgccagcgagctaattaacgatattgaagccctgtttgaataaggaaagagcatggacaaggaattaccgtggctggcggataacgcccaactggaactgaaatataaaaaaggcaaaacgccgctcagtcatcgtcgctggccgggcgaaccagtgtccgttatcactggaagtctcatccagacattgggtgatgaattgctacaaaaagctgagaagaaaaaaaacattgtctggcgttatgagaattttagtctggagtggcagtccgccatcacgcaggccatcaacttgatcggcgaacacaaacccagtatcccggcccggacaatggcggcgctagcctgtatcgcgcaaaatgacagccaacagttgctcgacgaaatcgtccaacaagaggggctggaatatgcgactgaggtggtgattgcacgccagtttattgcgcggtgttatgagagtgatcctctggtagtgacattgcagtatcaggacgaggattatggctatggttatcgcagtgaaacctataacgaattcgatctccgactgcgtaagcatctctctctggcagaggaaagctgctggcagcgttgcgccgacaaactcattgccgcactaccaggaataaacaaagttcgccgcccttttattgcgctgatcctcccggaaaaaccagaaatagccaatgagttggtaggccttgaatgcccgcgaactcattttcattctaaggagtggttaaaagttgttgctaatgaccccacagcggtgagaaaactcgaacactactggagccaggatatatttagcgatcgagaagccagctacatgagccatgaaaaccacttcggctacgcggcctgcgccgcccttttgcgcgaacaaggactggcagccattccgcgcctcgcgatgtatgcccataaagaagattgcggcagtctgctggtacaaattaaccatccgcaagtcatccgcaccttgctactggtggctgataaaaacaaacccagcctgcaacgtgtagctaaataccataaaaacttcccccatgcgacgctcgccgcactggcagaactgctggcgttaacagaaccaccagcccgccctggttatccaatcatcgaagacaaaaagctgcctgcacagcaaaaagcacgcgatgaatactggcgtacgctgttacaaacgctgatggcaagccagccacaactggcagcagaagtgatgccgtggttaagtactcaaccccagagtgtgctgaagagttatttaagcgcaccgcccaaaccggttattgatggcaccgataacagcaatctgccagaaatcctcgttagtccaccgtggcgtagtaagaaaaaaatgacagctccacgtcttgatttggcaccgctcgaattaactccgcaagtttactggcaaccaggcgaacaagagaggcttgccgccactgagcctgcccgttatttcagcacggaatctcttgcgcaacgcatggaacaaaaaagtggacgagttgtattacaggaactgggttttggggatgatgtatggctgtttctgaattatatactccccggaaaactggatgctgcacgcaatagtctctttgttcagtggcattactaccaggggcgggttgaagagatcctgaatggctggaactccccggaagcacaattagcagaacaggcgctccgcagcggtcacatagaagcgttaattaacatatgggaaaatgacaactacagtcattatcgtccggaaaagagtgtctggaacctgtatttattggcacagttgccgcgtgagatggctttgaccttctggctgcgtatcaatgagaaaaagcatctgttcgcgggtgaggactattttctcagtatcctcggattggatgcgctaccaggtctgctgttggcttttagtcatcgtccaaaagaaacatttccgttaattttaaattttggcgcaacagaactggcgctgcctgttgcccacgtctggcgacgtttcgcggcgcagcgtgatctggctcgccagtggattttacaatggccggaacatacggctagtgcacttatccctcttgtctttaccaaacccagcgataatagcgaagccgcattacttgccctgcgtttactgtacgaacagggacatggcgaattgctacaaaccgtggcaaaccgctggcagcgtacagatgtatggtctgccctggagcagttgcttaaacagggtccaatggacatttacccggcacgcattccaaaagcccctgatttctggcatccgcaaatgtggtccaggccgcgccttatcactaataatcaaactgttaccaatgacgctctggaaattatcggcgaaatgctgcgctttacccaggggggacgtttttatagcgggctggaacaactgaaaacgttctgccagccacaaacgctggcagcttttgcctgggatctcttcactgcgtggcaacaagctggtgcccccgcaaaagacaactgggcatttctggcgttaagtctctttggtgacgaaagcacggcacgggatctgacgacacagatcctcgcctggccacaagaaggcaaatctgcccgtgctgtcagcggcctgaacatccttaccctgatgaataatgatatggcgctgatacagctgcatcatataagccaacgggctaaatcccgccccttacgtgataacgcggcggaatttcttcaggtggtcgcagaaaatcgcgggctaagccaggaagagctagcggacagattagtcccaaccctgggccttgatgatccgcaggcgttgagttttgattttggtccccggcagtttaccgttcgcttcgatgaaaatctcaacccggttatctttgatcagcaaaacgttcgccagaaaagcgttccccgtttgcgcgccgatgacgatcaactgaaagcgcccgaggcactggcccgactaaaagggctaaaaaaagatgctactcaggtgagcaaaaacctgctcccgcgtcttgaaacggccctacgtaccacccgacgctggagcctggcagattttcattctctgtttgttaatcatccctttacccgtctggttacccagcgattaatatggggggtttatccggcaaatgaaccgcgttgtttactcaaagcctttcgtgtggccgcagagggggagttctgcaatgcgcaagatgagccaattgacctgcctgcggacgctctgattggcattgcccacccgttagaaatgacagcagaaatgcgcagtgaatttgcacagctttttgccgattacgaaattatgccgccttttcgccagttgagccgccgcacggtgctgctcacacctgacgagagtaccagtaacagcctgactcgctgggaaggtaaatccgctaccgttgggcaacttatgggaatgcgatacaaaggctgggagagtggctatgaggacgcatttgtctataacctgggtgagtaccggctggtccttaagtttagtcccggttttaaccactacaatgttgatagcaaagcgctaatgagcttccgttctcttcgagtgtaccgtgacaataaatccgtcacttttgccgaacttgatgtgtttgatttgagtgaggcgttaagcgcacctgacgtcattttccattaaaacacagcgggcagtgatgcaactgcccgttatcaacacgacttaccagcggggaaagcgatgatcgtgcaaaaagagctggttgctatttacgattatgaggtccctgtacctgaagatccgttttccttcagacttgagatccataaatgctctgaattatttacaggttccgtctatcgactggagcgattccggctacgtccaacatttcatcaacgtgatcgagaagatgctgacccgctaataaatgatgcgttgatttatataagagatgagtgtattgatgagcggaaattacgaggtgaaagtcctgaaactgtaatagcaatttttaatcgtgaactacagaatatattcaaccaagaaatagaataatatactctaaataattcaaattggtccgatccggcgcaacgtcccaatggcctggattataaatctcattatcttaattgcaacggggtccagccgtggttataattcgttcgttggaacacgatgttgcacaggctgtggtgttaggcctgaaaatagtaaataaaagaacctgcctcaccagcaggtttttttatttactgtgatctgctttccagatatttttcgctcaaacaactaatgcgccaaacatttattgcgcgtaaaatatcgtttatttcattaatacatttcagggatgaatatatgagtccgcagaataatcatctgcagcgtccgcctgctgctgtgttatacgccgatgaactggcaaaattaaaacaaaatgataacgcaccttgcccgcccggttggcagttaagtttgcctgcggcccgtgcttttatccttggcgacgaagcgcaaaatatcagccgtaaagtggtgattagcccctccgctgtcgaacgtatgttagtcactcttgctaccggccgcggtttgatgttggtgggggaaccgggtaccgcaaaatctcttctttctgaattactggcaaccgctattagcggcgatgccgggttaaccatccagggcggggcatctaccaccgaagatcaaatcaagtatggctggaactacgccctgcttatcaatcatggtccgagtacggaagcgctggtccctgccccgctttatcagggaatgcgcgacggcaaaatcgtccgtttcgaagagataacgcgtacaccgctggaagtgcaggactgtctgttaggtatgctttctgacagggtgatgacggggccggaactcactggtgaagccagtcagctctatgcgcgagaaggctttaatattattgccactgccaatacccgcgatcgcggcgtcaatgaaatgagtgctgcgctaaagcgtcgcttcgattttgaaacggtttttccgattatggatttcgcccaggagttggaactggtcgccagtgctagcgcgcgtttgctggcccatagcggtattccgcataaagtgcctgacgcggtactggaattactggtccgcaccttccgcgatctgcgtgccaacggcgaaaagaaaacgagtatggatacactgacagcgattatgtccaccgctgaagccgtgaacgtggcccatgctgtgggcgtccgcgcctggtttttagcgaatcgcgcgggggagcctgccgacctggtggaatgtattgccggaaccatcgtcaaagataacgaagaagatcgcgcgcgtctgcgccgttacttcgaacagcgtgtcgccacacataaagaagctcactggcaggcttattatcaagcccgccaccgcctgccgtgaggaaagatgcatgagcgagccgttaattgtcggcatccggcatcatagtccggcctgcgcccggctggtgaaaagcttaatcgaaagccagcggccacgatacgtgttgattgaaggcccggctgattttaatgaccgggtagacgaactgtttttagcccaccagcttccggtagctatttacagttattgccagtatcaggacggtgcagcccccgggcgtggtgcctggacgccatttgctgaatttagcccggagtggcaggcgctacaagccgcacgtcgcattcaggcacaaacttacttcatcgatttgccttgctgggcgcagagtgaagaagaggacgatagccctgatacgcaagatgaaagccaggccttactgctgcgtgccacccgcatggataacagcgataccctgtgggatcacttgttcgaagatgaaagccagcaaactgcattaccctctgcgctggcgcactattttgcccaactgcggggcgacgcctccggcgatgcgctcaatcgtcagcgcgaagcctttatggcccgctggattggatgggcgatgcagcaaaataatggcgacgtgttagttgtctgcggtggctggcacgctccggcactggcaaagatgtggcgcgaatgccctcagaaaattaacaagccagaattgcccagcctggcagatgccgttacaggttgttatctcacaccctacagtgaaaagcgccttgatgtgctggcaggataccttagtggaatgcctgccccggtatggcaaaactggtgctggcagtggggcttgcagaaggccggtgaacaactgctaaaaactatccttacccgtttgcgccagcacaaattgcccgcttctaccgcggatatggctgccgctcatctgcatgcgatggcgctggcacagttgcgcggtcatacactaccgttacgcactgactggctggatgccatagcaggcagcctgattaaagaagccctgaacgcgccgttgccgtggagctatcgcggcgttattcatcccgataccgatccgattctgctaacgttgatagacacattagcgggtgacggattcggtaaacttgccccttctacgccacaaccgcctctgccaaaagatgtcacctgcgaactggaacgtaccgcaatctcccttccggcggagcttaccttaaatcgctttacccccgatgggctggcgcaaagtcaggtgttacatcggctggcaatactggagatccctgggattgtacgccagcagggaagtacactgacacttgcaggcaacggtgaagaacgctggaaattaacccgcccgcttagccagcatgcggcattgattgaggccgcctgttttggtgccacactccaggaagccgcacgcaataaattagaagccgatatgctggacgcgggcggaatcggcagtatcaccacatgtcttagccaggcggcgttagcgggtctggcgtccttcagtcaacaattactggagcaactcacactattaatcgcccaggaaaatcaatttgccgaaatgggccaggcgctggaagtgctttatgccttatggcggctggatgaaattagcggtatgcaaggcgcgcagatattacaaacgacgttatgcgcgactatcgatcgcacgctgtggctgtgtgaatctaacggcagaccggatgaaaaggagtttcacgctcacctgcatagctggcaagcgctttgccatattctgcgcgatctacatagcggcgttaatttacccggcgtttctctttctgcggcggtagccttactggagcgacgcagtcaggcaattcatgccccggcgctggatcgcggcgcggctcttggcgcactaatgcgtctggaacatcccaacgccagtgccgaagcggcgctgacgatgctggcgcagttatccccggcacaatctggtgaggcgctgcacggtttgctggcgctggcccgccatcaactggcctgtcagccggcatttatcgccggtttcagcagtcatttaaatcaactgagtgaagccgattttattaacgccctgcccgatttacgcgcggcgatggcctggctaccaccacgagaacgcgggacgctggcgcatcaggtgcttgagcattatcaactggcgcaacttcccgttagcgcgctgcaaatgccgttgcattgtccaccacaggccattgcacatcatcaacaactcgaacagcaggcactggcaagcctgcaaaactggggagttttccatgtctgaactgaacgatcttctgaccacccgtgagctacaacgctggcgattaattcttggcgaagcggcagaaacgacgctttgtgggctggatgacaacgcccggcagatagaccacgcgctggagtggctgtatgggcgcgatcctgaacggctccagcgtggtgaacgttccggtggattaggtggcagtaatctcaccacccctgagtggatcaacagtattcacacgctgtttccgcagcaggtgattgagcggctggaaagcgatgccgtgctgcgctacggcattgaagatgtggtgacgaatctcgacgtgctggaacgtatgcagccttctgaaagcctgctacgcgctgttttgcacaccaaacatctgatgaaccccgaagtactggctgccgcccgccggatagtgtgccaggttgttgaagaaattatggctcgactggcaaaggaagttcgtcaggctttttctggtgtccgcgatcgccgtcgccgtagttttattccactggcgcgaaactttgatttcaaaagtactctgcgcgccaacctgcaacactggcacccgcaacacggcaagttgtatatcgaatccccccgctttaacagccgcattaaacgccaaagcgaacaatggcaactggtcttactggttgatcaaagcggaagcatggtcgatagcgtgatccactctgcggtgatggcggcctgtttgtggcagttacccggcattcgtacccatctggtggcgtttgacacaagcgtcgttgatctcacggcagacgttgccgatccggtagagttattaatgaaagtacagttgggcggcgggaccaatatcgccagtgccgtggagtatggtcggcaacttattgaacaaccagcgaaaagcgtcattatcctcgtgagcgatttttacgaagggggtagtagtagtttactgacgcatcaggtgaaaaagtgtgtccagagcggcatcaaagtgctgggactggcagcgctcgatagcaccgcaacaccttgctatgaccgcgatacggcccaggcgctggttaatgtcggcgcacaaatagccgccatgacgccgggcgagctggcaagttggcttgcggagaatcttcagagttgacataacttgcggagaatcttcagtcatgaatagtctacgtccggaattattagaactgacaccgcaggccctgacggcgttaagcaatgccggttttgttaagcgcagtcttaaggaactggaaaatggcaacgtcccggagatcagccatgagaacgacgctttaatcgccaccttcagtgacggtgtccgtacccagctggcgaacggccaggcactgaaagaggctcagtgcagttgcggggccaacggtatgtgccgtcatcgcgtgatgctggtgttaagttatcaacgactttgtgccaccactcagtctacggaaaaagaagaagagtgggatccggcaatctggctggaagaactggctacccttcccgatgctacccgcaaacgcgcacaggcgctggtcgctaaaggcatcaccattgagttgttctgtgcgccgggtgaaattccctctgcccgcttaccgatgagcgatgtgcgtttttattcccgcagcagtattcgtttcgcccgttgtgattgtattgaaggcacactttgcgaacatgtcgtactggcggtacaggccttcgtcgaggccaaagcgcagcaagcagaatttaaccatttaatctggcagatgcgcagcgaacacgtcacaagttctgacgatccgtttgccagcgaagaaggcaacgcgtgtcgtcaatatgttcagcaattaagccagacattatggcttggcggcatcagccagccgctcatccattacgaggcagcattcaaccgcgcattgcaggcggcagagacctgcaactggcgctgggtgagtgaaagcctacggcaactgcgcgccagcgttgatgccttccacgcccgcgccagccactataatgccggagaatgcttacatcagcttgcggcattaaacagtcgattaaattgcgcacaagagatggcccggcgcgacagtattggtgaagttcctcctgtgccgtggcgcacggtcgttggctctggcattgccggagaagcaaagcttgatcatctgcggctggtgtctttaggtatgcgttgctggcaggatattgagcattatggtttacgcatctggtttaccgatcccgacaccggcagtattttgcaccttagccgcagttggccgcgaagtgaacaggaaaacagtccggcagctacgcgtcggctgtttagttttcaggctggcgcactggcgggcgggcaaattgttagtcaagcagcaaaacgcagtgccgatggcgagctgctgttagctacccgcaaccgcttaagcagcgttgtgccgctgagccctgatgcctggcaaatgttgagcgcgccgttacgccagccgggcattgtggctttgcgggaatatttacgccagcgtccccccgcctgcatacggcctcttaatcaggtcgataacttatttattctgccggtcgctgagtgtattagcctcggttgggacagcagccgccagacgctggatgcgcaggtcattagcggcgaaggggaagataatgtgctgacgttaagtttaccagccagtgccagcgcaccttatgccgttgaacgcatggcggcgcttttgcaacaaacagacgaccccgtgtgtctggtttctggctttgtcagttttgttgaagggcaattgacactggaaccacgggtgatgatgacaaaaacccgtgcctgggcgctggacgcagaaactacgcctgtggcaccgctaccttctgccagcgttttgcctgtgccgtctactgctcatcagttgctgatacgctgccaggcgttacttattcaactgctccataacggctggcgctatcaggaacagagtgctattggtcaggcataattgctggcgaatgacctcaccgcggtgggtttttatcggctggcacatgtgttgggacaatttcgtaatacagaaagcgaggcacgggtagaagcaatgaataacggtgttttgctttgcgaacaattattccccatgcttcagcaacaaggatgaaatagtgctttttactaagagttctactccagttccggactgctcacgccacggtattaggcatatcctatatagcccctggtgagagtcaccagttccttgattaaataaaatggagttttacatgaaggctttcaataagctgttttccctcgttgttgcatctgttctggttttctctcttgctggctgcggtgacaaagaagaaagcaagaaattcagcgccaatctgaacggcactgaaattgccattacctatgtctacaaaggtgacaaggtgcttaagcaatcttctgaaaccaaaattcaatttgcctccattggtgcaaccaccaaagaagatgctgccaagacacttgagccgttaagcgccaaatacaaaaacatcgcgggtgttgaagaaaaattaacctataccgatacctacgcgcaggaaaacgtgactatcgatatggaaaaagtggattttaaagccctgcagggtattagtggaatcaacgtttctgctgaagatgccaaaaaaggtatcactatggcgcaaatggaactggtgatgaaagccgctggttttaaagaagtgaaataatcggttggcggtcatgctctaaacatgaccgccaattttttagccttttttcacatgctggcgcgctgccagtccacgcagaaaataacgtaaaaattgatcgccgcattcgcggaagtttttatgatccggtgcgcgcatcatcgctgtaatttccggcatgctaacgcggaactgctgttcggtgaggatagccagaatgtcatcggttttcaggctaaacgcgatgcgtaattttttcagcacgatgttgttattaatgcgacgttccggctccagtgccggagcagactcatccttgccgcgtttttcataaatcaggccattgaggaaactgctcaaaacaatgtccggacaacgctgaaaaccctcttcgtcttctttacgtagccagacggcgatctgttccgcggtggcttcgacattacccagcgccagaatacgcaccaggtcattattattggctttcaaaatgtagcgcacgctgcgcagaatatcgttacttagcatgaggccttcaggtgttgatgaggcaaaaagccattttagcagtcttttacaggccaatcgcctcttttaagcttttcagataacggcggctgaccggcacggttaagccattacgcaaaatcaactcggcctggccgttatcttccagacgaatctcctgtaaatgcgcgaggttaaccagatactgacgatggcagcgcagtagtggtgtacgactttccagggtacgtaatgtcaattcggtaaagccctctttcccttcgtggctggtaacgtagacaccgctcatccgactgctgacaaatgccacatctttcatttgcagcaaataaatccgactatgccccgtacaagggataaatttcagcgcctgttgattttccggtaacaggctaacatcctgcttgctgcgctcctgacgcaatcgcgccagcgttttctccagtcgcgcttcatcaattggcttcagcagataatcaaaggcatgttcttcaaaggctttaattgcgtattcgtcaaacgcagtgagaaaaacaatatacgggcgatgttccgggtcaagcatccccaccatttccagaccactgatgcgcggcatctggatatcgagaaacagcacatccgggcgcagtttatgcaccgcgccgatcccttccacggcgttactacactctccaacgatttcaatatcgctctgctcctgcaaaaatacacgcaggttctcccgtgctaacggttcatcatcgacaattaagactttaatcatgcctcgtccctccatggtagtcgtaacgttattcgggtgtaactatcaggctcacaggcgacgcttattccatagtcatcgccaaaccgttcacgtaaacgcttatccaccagattcatccccagcccactggcattggttaccggttgatacaaaccggcattgtcttcgatctccagcatcaaatgttgcccctcacgtcgggcgctgattgccactcgccctgtatccagcagttgacttgtcccatgtttaatggcgttttccactatcggttgcagggtaaacgcgggcaattgctgctgggataattcttgcggaatagcaatgttgacctgcaaccggctctggaagcgcgccttttcaatttgcagataagcattcacatgttcaatttcgtcggcgagagtaacaaactcgctaggccgctttaagtttttgcggaaaaaagtggaaagatactgcaccagctggctggcctgttcgctgtcgcggcggatcaccgctttaatggtgttaagcgcattaaacaaaaaatggggattcacctgggcgtgaagcagtttgatctcactctgggtgagcatcgctttttgccgctcatattgcccggcaaggatctgcgcgctaagcaattgcgcaatcccctcacccaacgtgcggttgatgctactgaataaacggtttttggcttcatacaatttgatggtgcccatcacccgctgattttcaccacgcaacggaattaccagcgtgctccccagtttgcattgcggatgcaaagagcaacggtaaggtacttcgttgccatcagcgtagaccacttcaccggtttcaatcgcttttaaagtataagtactagaaatcggtttgccgggtaaatggtggtcgtcaccaattccggtaaaggccagcaatttctctcgatcggtaatcgcgactgcaccaatatccagttcctgatacagcacctgagccactttcatgctgttcacttcgttaaacccctggcgcaaaatgccttccgtgctggctgccactttcagcgcagtggcagaaaaagcgctagtgtatttttcaaacatcgcgcgtttatcgagcaatatacgcataaacagcgccgcgccgacggtattggtgaccatcattggcgcagcaatattactcaccagacgcaccgcatcttcataaggtcgggcgatcgcaaggatgatcagcatttgcaccatttcagcgacgaacgtgacggcaccggcggtaatggggttaaagactttatcagtgcgcccgcggcggatcaggatgctgtgtaccaggccaccgagtaatccttcaacgatggtgctgatcatgcaacttaacgcggtcatgccccccatgctatatcgatgtaagccgccggtcagcccaaccagcccaccgacgaccggaccgccgagtaagccgcccattaccgcgcctatcgcacgggtattggcaatagaatcgtcaatgtgcaacccaaaccaggtgcccatgatgcagaagatggaaaagacgatgtagcagagaaatttatgcggcagacgaaccgtgacctgcattaacggtatgaataatggcgttttactcattaaccatgcaatgactaaaaaaacgcacatctgctgaagcagcagcaacaccagattaaaatcgtacatacccgcaaaccacacttccctttaaaacgcgtaacatacattgcctgcgtttaactttctttgaactcttgcagaaaaatgagaattcgtgagtacgatcactcaaaatcgcctggcaaaaataaaatcaccctatagatgcacaaaaaacgggcaaaactacctggttcgcaaaactgcgtctaaagttaaaccgggacctcgcgagcaagggtgagacgatggcgctttacacaattggtgaagtggcgttgctttgtgatattaatcctgtcacgttacgcgcgtggcagaggcgttacggattgctgaaaccgcaacggacagacggcggtcatcggctgttcaacgatgccgatattgaccggatccgcgagatcaaacgctggatcgacaacggcgtgcaggtcagcaaagttaaaatgctgctcagtaatgaaaatgttgatgtgcagaacggctggcgcgatcagcaagaaacattactgacttacctgcaaagcggcaatctacatagcctgcgaacgtggatcaaagagcgcggtcaggattaccccgcccagacactcaccacacatctgtttattcctctgcgccgacggcttcagtgccaacaaccgactctccaggcgctgctggcgatcctcgacggcgtactgatcaactacatcgccatttgtctggctagcgcacgtaaaaaacagggtaaagatgcgctggtggttggctggaatattcaggataccacccgtctgtggctggagggctggattgccagtcaacaaggatggcgcattgatgtcctcgcccacagcctcaatcaactacgccctgaactattcgaaggccgtacattgctggtgtggtgcggtgaaaatcgaacctccgcccaacagcagcaactcaccagttggcaagaacaaggccatgatattttcccactcggcatttaatgattcgttaacaaatgcgctttactgtacaatcctttcgttaacataaggagtgcattatgcgcatagctaaaattggggtcatcgccctgttcctgtttatggcgttaggcggaattggtggcgtcatgctcgcaggttatacctttattttgcgtgctggctaagcgcctgcaccagcctttcaaacaggcggtctgcgatgatcgccgccagtgccaccagtaacgccccctggatcacatacgcggtattaaatccgctaagcccgatgatgatgggcgtacccagcgtgctggcccctaccgtactggcgatcgtcgccgtaccaatgttgataatcacgctagttcgcacgcccgccagaatcaccggagccgccagcggtagctcgaccttacgcactcgctgaccacgactcattcccatacctttcgcaacttctgtcacgctggcatcaatcgctcccagcccggcaagtgtcgcctgcaggacgggcagcacaccgtaaaggatcaaggcgataatcgctggttgcagaccaaagccgatcaccggaacggcgatcgccagcactgcgacgggcggaaaagtctgtccaacggcggcaatagtttccaccagtgggcgaaattccgcgccccacgggcgagtgacagcaattccggcaccagtgccaatgatcaccgcaaacaaactgctaattcccaccagccagaaatgagccagtgccagagctgcaaaactttcttgctgataaacgggtcgtggcagttgtgggaacaaggcagcaaacagcggctggctgtaaggcagccagaaaatcagcgccacaaacagagcaatgagccagaacagcggatcgcgcaacatcttcatacgcttacgcctccaccagcagatcctgaaaatgcagcgtgccgcaaggctggccctgcatgttcaccaccggcagcacctcgcatccccgcgcaacaaacagagagagcgcatcgcgtagcgtcatctcttctgccagtgcctcaccatctgctcgttcttcgcgacgcacgtaatccgccacactacgtaagctaagcaggcgcacacccagttcactacgtccaaaaaactggcggacaaaatcattcgccggacgagtcagcatcgtcagcggattgccctgctgcactacttcaccgtgatccatcaataccagatgttctgccagccgtagcgcctcatcaatatcatgagtgaccagcacaatggtacgccccagcaaacggtgaatgcgcgtcatctcttgttgcaacgcgccgcgcgttaccgggtccagtgcgccaaaaggttcatccattagtaagacttgcggatcggcagccagtgcacgcgccactcccacacgttgctgctgaccaccggaaagctgatgcggataacgctcacgcaaattactctccagccccagtagcgccattaattcgtcgatacgatcgtcaatccgcgcccggctccatttttgtaattgcggcacggtagcgatgttttgcgccacgctccagtgggggaacaggccaatagattgaatggcatagcccatccggcggcgcaactccagtactggcaggctgcgaatttcttctccggcaaagcggatctctccgctgtcatgctccaccaggcggttaatcattttcagggtggtggatttgccggagccagatgtgccaatcagcacgctaaaactcccttcctgaaaattgagattgagatcgttaacggctttttgtgcgccgaacagtttgctgacatggctaaattcaatcattacgtttcaccttcagcagtgcgataagcaaatcgaacagcgcgtcggtaagcaccgccagaacaattaccgggatcacccccagcaacactaaatcaatggcgctgcttagcagcccctggaaaaccagcgcaccaaaaccgcctgcgccgattaacgccgcaatcaccgccatacctacagtttgcaccatcaccacccgcaggctgcgcagaaataccggtaacgccagcggtaactgaacatgcaggaaacgctgcgccccgctcatccccatcgctctggcgctttccagcacatcgcgcgggatctggttcaaaccgactaccacgccgcgcaccagcggcagcaaggcatagagcaccagcgcaatcagtgcgggtgtcattccggttcctgctatgccgagcgtccccagccacggaaaggccgtaaccagcgcggcaagcggcgcaatcaacaggccaaagagcgccacgctaggcacggtctgaatcacattgagcagagaaaaaattgccccctgccgagcagtggaaaagtagcaccagatgcccaacggcacaccaatcactaacgcaggcagcaccgcaccaaacagcaacgtcagatgttgtgccagcgcgtcgtcaaacacatcctgacggttggcgtattctttcattagactgagatcgttaagcgtgccggagtacagcaaccacagcggaataatggcaatctgcatatgcaacaaccagcgccacagcggatgcgtggagattcggcggatggcatcgctacaggccagcaatgccagcgccgcagccagccagaaaccactgccgaggctggtacgcgccagcgcactgccattttgcgccagttgggtcgccgcctttccagctccccacaccagcaatacgaagacgaattgcgccagaatgagtgcacaaatgctgccttttttaccgggaataaaacaggccgtcagccaggcgcaaccaacgcccaccagcatccagatcgtttgcggccacagctgccagagatgacgcccctcaccgctaactaaacgattaggcgcgtaactgataaacggcagcgccgctgcgattgccgtcagcaacagcagcagcgccagaacaggattaatacggaaataagtcacgggaaattacttcgtccaccctttttgtttcaggtagtcggcagccacttttttggcatccagtccttccacagcaatgctggcattcagttgctgcaatgtttttgcatcgaggctggcgaagactggctgtagccactgtgccatttgcggatactccctcaacacgctctcacgcaccactggtgcaggcgcgtagataggttgcacaccttgcggatcgcttaaggtttgcagccccagcgccgctaccgggccgtcagtgccgtaagccattgcagcattaacgccagaggtttgctgggcagcggctttgatcgtcaccgccgtgtcgccaccagccagactcagcaactgatcctgaccgagcttaaagccataggctttttcaaacgcgggtaacgcatcggcgcgttcgataaactctgcgctggctgccagtttgaaggtgccgccctcttgcagataacgactcaggtcggcaaggctagtgagtttatttttctctgccacatcctgacgcacggcgatagtccaggtgttatttgcaggcgcgggcgtcagccagattaacttgttgtgctcgctatcgagctttttgactttctcgtaaccttgctgcgcgtttttccacgctgcatcgttttcatctttaaagaagaaagcgccattgccggtatattccggatagatatccagttcaccggaagtaatcgccccgcgcaccacaggagtcgttccgagttgcactttattcaccgtcggtacgccgtggctttccagcacctgcaaaatgatattgccgagtagcgcaccttcggtatcgattttactaccgactttaacgggggaagccgcctgtagcggcaggctcacggctgccaacataaccagactacctgcccagagctttaagagtggcatgatgctttcctcattcttttactgttgttttcagcgaattaagagaaaagcatagttgataatggcggggttagcttgagcggaaggattcagttgcagaatcagataaatacttaagaggcatattcggtccggcgtttcctgccggatgcggcgcgagcgccttatccggcctacaaagggcgcaaacgtcgcgcccttactaaagcattacagcaactcaaactcgcctttcttaacgcgtgcggaatcagtgccgataaagacattgaacttgccaggctcggcgtcatatttcatctgttgattccagaacttcagcgcctcaatatcgatcgggaagctgacagtctgagtttcgcccggtttcagggtgattttctcaaagcctttcagctgtttcacagggcgactcatggaagccgtcacatcctgcaagtacatctgcactaccgtggcaccctcgcgcttaccggtgttcgtcacctgcacgctggcagtcactttgccgtcacgcttcatggtcggcgcagaaagtttcacatcagagacggtgaaagtggtgtagctcagcccatagccgaacggatacaacgccccgttagcttcatcaaaataacggctagtgtatttgttcggcttgtcggcattatacgggcgaccggtattcagatggctgtagtacaccgggatctgcccgacagaacgcgggaaggacattggcagcttgccggacgggttgtaatcgccaaacaatacatcggcaattgcattaccgccttcagtccccgcaaaccaggtttccagaatcgcatcagcctgctgatcttctttcaccagcgccagcggacgcccgttcatcagcaccagcaccagcggtttaccggtggctttcagcgccgcaatcaagtcacgttggctttgcggaatagtgatatcggtccggctggaggcttcgtgcgccatcccctgtgcttcaccgactacagccaccaccacatcagattgtttcgccgtctgcaccgcttcatcaatcatctcttgcgggctacgcggatcgactttgaccgcttcttcatactgattcaggaaatcgataatgcctttgtcactggtaacgttcgcccctttggcatacagcactttaccgttttcaccgacggcatttttaatcccggtcagtacggtcacggattgatcggcaacaccggctgcggaccagctgcccatcacgtcacgtttactgtccgccagtggcccaaccaccgcaatggtggcgctttttttcagcggtaacgtttcgagacggtttttcagcaacaccaagctttcgcgcgccacttcacgcgcttctttacggtgcaggcggctttcggcattggtatccaccgggtcagactctttcggccccaaatggctgtatgggtcgttaaacaaccccatatcatatttaacgttcagtacatggcgggcagcatcgtccagctctgccatcgtcactttgccggatttaatcaacccaggcagatacttgctgtagtactcgtcgctcatgctcatgttgattccggatttcagcgccacgcgcaccgcatcttccgggtctgccgccgtgccatgtttaatcagctctttgattgcaccgtgatcggaaacggtgatgcctttaaagccccactggtcgcgcagaacatctttcagcagccaggaatcggaggtggctggcgtgccgttcaggctgttcagcgccaccatcaccgcgccgctgcctgcgtccagccccgctttgtacggcggcatataatcattaaacaggcgctgcggactcatatcgacggtgttgtactctttaccgccttctaccgcgccgtatgcggcaaagtgtttgacgctggtcatcacgctgtagcgatctgccgggcttttaccctgcatcgcttccaccatggttttacccattgtactggtgagatacgtatcttcgccaaaaccttcggaagcacgtccccagcgcggatcgcggctgacatcgaccatcggtgcccaggtcatattcaggccatcatctgccgcttcataagcagagacacgtccgaccgttttcactgcatcgaggttaaaagagctggccagaccgaggctaatcgggaacaccgtgcgctgaccgtgcagcacgtcgtaagcaaagaaaagaggaattttcaggcggcttaattccatcacctgatcctgcatggcgcggatatcctgacgggttacggtgttgaaaatcgccccaacctgaccgtctttgatcatctcgcggatcgcctctttcgggttatccgggccgacgctgattaagcgcagctgaccaattttctcatcaactgtcattttcttaagcagttcggtgacgaacgcatcccgcgcttcgggcgttaatggatggttgccgaataaatcatccgccagtgctggctgcagggccagactcaccgcgattcctacactacatagccatttcatatggatttttcttcctttgttgcccgacgtggcagcgaaaatggtgcaaaaaccgtagtttgccataagcatgatggagagagaaaaagaatgctcagtttattgtctgaattttcaaaatattcactcgctgaattgttatacaaggcgctattctagtttgtgatattttttcgccaccacaaggagtggaaaatgtcttccatgacaacaactgataataaagcctttttgaatgaacttgctcgtctggtgggttctagtcacctgctcaccgatcccgcaaaaacggcccgctatcgcaagggcttccgttctggtcagggcgacgcgctggctgtcgttttccctggcagtctactagaattgtggcgggtgctgaaagcctgcgtcaccgccgacaaaattattctgatgcaggccgccaatacaggcctgaccgaaggaagcacgccaaacggtaacgattatgatcgcgatgtcgttatcatcagcaccctgcgtctcgacaagctgcacgttcttggcaagggcgaacaggtgctggcctatccgggcaccacgctctatagcctggaaaaagccctcaaaccgctgggacgcgaaccgcacagtgtgattggaagtagctgtataggcgcaagcgtcatcggcggtatttgtaacaactccggcggcagcctggtgcaacgtggcccggcgtataccgaaatgagcttattcgcgcgtataaatgaagacggcaaactgacgctggtgaaccatctggggattgatctgggcgaaacgccggagcagatccttagcaagctggatgatgatcgcatcaaagatgacgatgtgcgtcacgatggtcgtcacgcccacgattatgactatgtccaccgcgttcgtgatattgaagccgacacgcccgcacgttataacgccgatcctgatcggttatttgaatcttctggttgcgccgggaagctggcggtctttgcagtacgtcttgataccttcgaagcggaaaaaaatcagcaggtgttttatatcggcaccaaccagccggaagtgctgaccgaaatccgccgtcatattctggctaacttcgaaaatctgccggttgccggggaatatatgcaccgggatatctacgatattgcggaaaaatacggcaaagacaccttcctgatgattgataagttaggcaccgacaagatgccgttcttctttaatctcaagggacgcaccgatgcgatgctggagaaagtgaaattcttccgtccgcattttactgaccgtgcgatgcaaaaattcggtcacctgttccccagccatttaccgccgcgcatgaaaaactggcgcgataaatacgagcatcatctgctgttaaaaatggcgggcgatggcgtgggcgaagccaaaagctggctggtggattatttcaaacaggccgaaggcgatttctttgtctgtacgccggaggaaggcagcaaagcgtttttacaccgtttcgccgctgcgggcgcagcaattcgttatcaggcggtgcattccgatgaagtcgaagacattctggcgttggatatcgctctgcggcgtaacgacaccgagtggtatgagcatttaccgccggagatcgacagccagctggtgcacaagctctattacggccattttatgtgctatgtcttccatcaggattacatagtgaaaaaaggcgtggatgtgcatgcgttaaaagaacagatgctggaactgctacagcagcgcggcgcgcagtaccctgccgagcataacgtcggtcatttgtataaagcaccggagacgttgcagaagttctatcgcgagaacgatccgaccaacagcatgaatccggggatcggtaaaaccagtaaacggaaaaactggcaggaagtggagtaaaaattacggatggcagagtatcgccatccgaattcacttaatcgttctgtgccgtctgccccgccgccgccatttgggcggctttttgttttttatagctcaacgctgctgccggcacaggcatcactttaccggtttcaatccaggtacgcaggcggctggcatcggcaaaatgggtatatttgccaaacgcgtccatcactaccagcgccaccggtttattattgataaccgtacgcatcaccagacaatggcccgccgcattggtaaagccggttttggttaactgaatattccagttatcgcgatacaccagatgattagtattgcggaacggcagcgtatacgtcggattagagaaggttgccatatcttcccgggtagtacttaactgcccgatcaacggatattgtttgctggcaatgagcagtttggttaagtcacgggcagtactaacgttatgcacgctcaatccggtaggttcaacaaagcgcgtgttgttcattccgaggcttttcgctttcgcattcattgccttaataaaggctttgtaaccaccgggataatggtgcgcaaggcttgccgccgcgcggttttcactagacatcagcgccagcaacagcatatctttacggctgatttcgctattcagtcgtacgcggctatagacccctttcatctccggcgtctggctgatatccacttttagtttttcatccagcggcagtcgtgcatccagcacaaccatcgcggtcattaatttgctgatagacgcaatcggacgcaccagatccgggtggttgctatagatcactttgttggtattcagatcaacaatcatcgcgctaccggaggcaatttccggttgactagcggtggtagcggctgccgttttcgcaacggcctgcggtgcaaaaggcacagccagcatcagggccaggctaaataaagaaactcgaaatttcggcatgatgagcattcagatagtggttcacgcgcacgggttgcgcaccgccggagtaaggatttactgaggctagcgacgccatcataacgagcaaaaagtgcgatcgtcaaaggagaatcgtgaggaaatgctgcattgctgacatttacgccagcaatgcaacgtcaaagaactttttagaacaaacgataaccgtagccccatagtataacggttagggcgagcagcacttccagtaccagcacgccaatcgccagcgtgctactagagaagctaaggccttcctctttgttgatattcaggaagctcggaataccaaggtaaagcaggtagccggtgtaaaacagcgccaccgtgccgaccagcgcacacaaccagaccagtggataaagcgccaccagaccgcttaaaaacagcggagttgcaacgtagcccgcgaagaccatgcagtgcgcaagactcggacgctgcggataattacgcgccatccaccagatgacccgccccatcaccgcgaccccagccagcataacgccgtaaaacaagacagccagcgccagtccggtaaaccaggataacttcaggatagtgccatcgccaaaattccagccaatctgtgtagtgccaatgaaggcgcaaatcaccggaatcgccgccatcagcaaaacgtggtgggtgtaatggtgagaaatcgtttcgttttcgcgattaatcacctgcatttcacgatcgggatgggaaaacagtccccagacatggctcataccgcccccttgttgtgagttcatgaacctgacagttcaagtataagtcagcttgtgattattttttgttcgcccatgtaattttcactgtctgatgaacgtcctttttcagcgtgaatgattcacagggtgtatgcttactggcaaccaaagggagacagactggcctatggatctcaatacacttatcagtcaatatggttatgccgcgctggtgatcggtagcctggcggaaggtgaaaccgtgactttgctgggaggcgttgcggcgcatcaggggctattaaagttcccgctggtggtactttctgtggcgcttggcggcatgattggcgaccaggtgctctatctgtgcgggcggcggtttggcggcaagctgttacgccgtttcagcaaacatcaggataaaattgagcgggcgcagaaacttatccaacgccatccgtatctgtttgtcattggtacgcgctttatgtatggctttcgggtgattggcccgacgctgattggtgccagccagctgccgccgaaaatctttctgccgctgaatattctcggcgcatttgcctgggcgttgatttttaccactattggttacgctggtggtcaggtgattgcgccgtggttgcacaatctcgaccagcatttgaagcactgggtctggttgattctggtcgtggttctggtggtgggcgtgcgctggtggctgaaacgacgcgggaagaaaaagccggatcatcaggcgtaaaaccattgccctggataaggcgttcgcgccgcatccgacatccggagtaccatgcctgatacgacgcttgtgcgtcttttcatgccgaccaaaatattacccaatgaaatatccacgcacctcactgcgttattctgggttgaactgtggattcgccaacataaagccgccatccactatcaagctctgcccggtggtgtaatttgcgccctcgctacaaagccacaccaccaggctggcaatctcatgcgttgcgccaaaacgccgcaagggaatgctaggctccgcgtcgggcttcacgtcgctgtcatccatgccattcattggcgtggcgatcgccccaggcgcgactgcgttcaccaaaatcttatgcctgaccagctccagcgccatcgctttggttaacccaccgagcgcatgtttagcggctgtgtaggcgctggcatccggcagcggcgtatgttcatgtacgctcgtaatgttgatgatgcgaccgccctgcccttgtttcaccatctgacgagccgcaatttggctgcataagaatgcaccatcgacatcaacggtaaaaatcttgcgccactcatcaaaagccatatcaagaaacggcgctttggtcattgcacccgcattattcaccagcacatcaatgcgccccagccgttgaatgagtttctccagcgccagtgccccttctggtagattgccgagatccagctgcacgatctccgcacgtacgccgtggctaactacctcacgcgcggtatcttttgccccttcttcatcactgtgccaggtaataccaatatcaaacccctgctgcgccagtaataacgcgcactctttgccgatcccgctatcggaggcggtaataatcgcaacctgtgccatcgagttctccacttaacgctgaataaacgttaagtatagaaggcgcatatcatcagcgtttgtaccccccgcccaacgcaccagtgagttgaatggaggcatccagccactgcccttgcaataacaggccattggcccgctcacgcagcgcggggattctggcttcgctgacgcgggaaccagcaatgatgcccgcgttaaagcgcgcctgcgcaagacctaccacacgcaaggcatcgcgctcaatttgcgcctgatgctggtttttctccgccagtgtctgaacctgactggctgcccgcgccacgtcattcaccgcttcaaccaccgctttgttgtagctggcgatagacaagttgctttcggcttttgcgatatcgagattggcgttaagacgaccactatcgaaaatgggtagcgtcaggcctgccgtaacgcccatttgctgcgcggaatgacggaacagatcgcttaagtgcaacgcatcctgttgcaggaaggccatcaggttgatgtcaggataaaatgccgcttttgccgcatcaatggtgcttaggctactctcaacgtaccagtgcgccgcctgcaaatctgcccgccgggccagtaaggagtaccccagttcatcaggaagctggcttgccactttcggcaacgcgaccggtttaagcttcaaactctttgtctggttatttgtaagtgcgcttaaccgtgcctcaataattttcattttccccgcgacatcgttgagctgctgccgggttttgctggcattaatatcggtttccacaccttcaacactagaagtaatcccgttctgatatagctggcgatcggtcgcgataatggtgttctgctctttttctatttgctgcaagaccgtgtttaacgccgcctgggtttgccactcccagtacaggcgggctacgctgccagccagcaattggcgggtttgctcgcgttccgccgcccgtgctttaaccgtacccaggcgggcagtaacctccgcccgattctttccccagatatcgagatgccagcccgccgttaagccaaaagtaccgttggtgtaccacgggccggtcgtacctgcggccggatcgttcagagcaaacggccccattaagccttctgcgctcattttttgccgctccatatccgccgaaaagtcgatctgcggaccatcctgagtggcaactgccttcgcctgggcttcagctagctgaatgcgctgttcagccacctgcatatccggtgcgttctgtagtgcattgttaattaaggaagactgttgattatcgtgatactccagccaccattggctgtctggccaaccattttcagcgccgtgggtaatgcggtgtcaacttgtgcagcgggcgtttgctggcttaacgcctggcgggtttcatgcataggcgcacacccggccagcatcagtaacagcggaaaacaggcgatggctggataaaaggaatcacgattcatgggggaataatcaggtaagaaaaggtgcgcggagattaccgtgtgttgcgatatattttttagtttcgcgtggcaatacatcagtggcaataaaacgacatatccagaaaaatatacactaagtgaatgatatcttccgatttatcttaatcgtttatggataacggcaaagggcttcgttttttcctatacttattcagcactcacaaataaaggaacgccaatgaaaattatactctgggctgtattgattattttcctgattgggctactggtggtgactggcgtatttaagatgatattttaaaattaattaatgtcatcaggtccgaaaataacgagaatatttcagtctctcatcctgttgcgctcctgtcatgtgcattgcttcatataatcactggcgcaaggagcgcgcagggggcggccaatcgccgccgccccctgcacccccgggctctggcgaacaaaatcgccgctgcgcggtgccctcggcttatcccttacggctaccgggtcgggcgcgaggtaacatccctgtaaaacgcgccctcagcccacatccatgtgggctgccccggccttcagggaacgcctcggcaattttgacgccaccaaacaaccgtgcggcctattgataaagagctaacacattgtcaaaaaacatcactatggttttttagagtttctcgatatcaattgcctgaatagcccttgcaatatcaggggaattattcaacacccgaacatgctgaaataattccgttgcttcatcgtattctttacgcaaataactcaaccactgtttaatccgcgcaacgtgatataacccggtatcgccctgcttttccagacgggtatatttttgcagcaaagcaaccacctccggccacggcattcgcggttcgttatattttaccacccggctcaggttgggaatattgagcgccccgcgaccaatcatcactgcgtcgcagccgctgatcgccatgcattgttgcgcgctctgccagtcccagatttcaccgttggcaatcaccggaatattcagccgctggcgaatatcgccaatcgcctgccagtcaatatgctccgcgcggtaaccctgctctttcgtccgcccatgcaccaccagctccgtagcgccagcctgttgaaccgcatcggcgatttcaaatttcttctcaccgctgtcccagcccagacgcactttcacgctgacgggcaaatgcgccggtacagcttcacgcatcgcttttgcaccctggtagatgagttcaggatctttgagtaacgtcgccccgccgccgctaccgttaaccgttttgctcgggcagccgcaattgagatccacgccccaggaacctaactccaccgcacgggcggcgttctctgccagccattgtgggaactgacctaacaactgcacgcgcaccagcgtaccagatggtgtccggctggcgttttgtagctcagggcaaatgcgatgaaagacttttaccggcagcagttgatccaccacgcggacaaactcggtgatgcacagatcgtagtcgttaacttcggtcagcaattcacgcaccagagagtcaagcactccctccatcggtgccagtaacacacgcatatcatcacccgcaaaaaaatgaggcgctatgttagcgcctatggtcagcggattaaaggtctgcaaagagggattgctgcaaactgcaatccctctctatgcttgatgtatgcctgagttcgctgcgcattgcgtaatgccggggagcgaaaaaataagcgctgatttcttaatgtgatcggtagcacgttttacgaattaattgtatgatgaatccatctcatctggggtgttgattatgagtaagacactgaacattatctggcaatatttacgcgctttcgtcctgatttatgcctgcctgtatgcaggcattttcattgcttccctgctaccggtaaccattccgggcagcatcatcgggatgctgatcctgtttgtcctgctggccttgcaaattcttccggcaaaatgggtcaatccggggtgctacgtactgattcgctatatggcgctattgtttgtgccgattggcgtaggcgtcatgcaatattttgatttgctccgcgcacagtttggcccggtagtggtttcctgtgcagtcagtacgctggtggtttttctggtggtgagctggagtagccaactggtacacggtgaacgtaaagtcgtaggtcagaaaggaagtgaagaatgatggcgaatatctggtggagtttaccgctgacattgattgtcttttttgccgcccgcaaactggcggcacggtataagtttcccttgcttaacccgttgctggtagcaatggtggtgatcattccttttttaatgctgactggcatctcttacgacagctactttaaaggtagcgaagtgctaaacgatctgctgcaaccggcggtcgtcgcgctggcctatcctttatatgagcagctacaccagatccgcgcgcgctggaaaagcatcatcaccatctgttttatcggcagcgtggttgcgatggtgacggggacttccgtggcattgttgatgggcgctagtccggaaatcgccgcgagtatcctgccgaaaagtgtcaccacgcctattgcaatggcggttggcggcagtattggcggtattccggcaatcagcgcagtttgcgtgattttcgtcggcatcctcggcgcggtatttggccatacattgcttaatgcgatgcgtattcgtaccaaagctgcgcgcggtctggcaatggggactgccagccacgccctcggtacggcgcgctgcgccgagctggattatcaggaaggtgcatttagtagcctagcgctggtgttatgcgggataattactagcctgatcgcaccgttccttttcccgattattctggcagtaatgggctaaaatttgcgatgcgtcgcgcatttttgatgtatgtttcacgcgttgcataattaatgagattcagatcacatataaagccacaacgggttcgtaaactgttatcccattacatgattatgaggcaacgccatgcatccacgttttcaaaccgcttttgcccaacttgcggataacttgcaatctgcactggaacctattctggcagacaagtacttccccgctttgttgaccggggagcaagtcagtagcctgaagagcgcaacggggctggacgaagacgcgctggcattcgcactacttccgctggcggcggcctgtgcgcgtacgccattgagcaattttaatgttggcgcaattgcgcgcggtgtgagcggaacctggtatttcggtgccaatatggaatttattggtgcgacaatgcagcaaaccgttcatgccgaacaaagcgcgatcagccacgcctggttgagtggtgaaaaagcgcttgcagccatcaccgttaactacacgccttgtggtcactgccgtcagtttatgaatgaactgaacagcggtctggatctgcgtattcatctgccgggccgcgaggcacacgcgctgcgtgactatctgccagatgcctttgggccgaaagatctggagattaaaacgctgctgatggacgaacaggatcacggctatgcgctgacgggtgatgcgctttctcaggcagcgattgcggcggcaaaccgtagccacatgccttacagtaagagcccaagcggtgtcgcgctggaatgtaaagacggtcgtattttcagtggcagctacgctgaaaacgccgcattcaacccgactctgccaccgttgcagggagcgttaattctgttgaatctcaagggttatgattacccggatatccagcgcgcggttctggcagaaaaagccgatgcgccgttgattcagtgggatgccacctccgcaacgctgaaagctctcggctgtcacagtatcgaccgagtgcttctcgcttaagcctggtgccggatgcggcgtgaacgccttgtccggcttgccagccctctcctggtgtcgaaattcccggcaaacagtttgccgtttcttgcgcaaaaccagcgggtaaagtagcctgatggaaattttccttagatcgagtctcctgcatgttaaagcgcgtgttcctcagcctgttagtcctgatcggcttgctgctgttgactgtgctcggcctcgatcgctggatgagctggaaaaccgcgccttatatctacgacgaattgcaggatctcccctaccgccaggtcggtgtggtgctcggaacagcaaaatattatcgtactggcgtaattaatcagtattatcgctaccgcattcaaggagcgattaatgcctataacagcggtaaggtaaattatctattactgagcggcgataacgcattgcaaagttataatgagccgatgaccatgcgcaaagatttaatcgctgctggtgtcgacccaagtgatattgttctcgattacgcaggctttcgtacgctggattccatcgtgcgtacacgcaaagttttcgatactaatgatttcattattatcacccaacgtttccactgtgagcgagcattatttattgcgctgcatatggggattcaggctcagtgttatgccgtaccgagtccgaaagatatgctgagtgtacgtattcgtgaatttgccgcccgtttcggtgcgctggctgacctttatatttttaaacgtgaaccgcgttttttagggccgctggtccctattccggctatgcaccaggtaccggaagatgcgcaggggtatcccgccgtcacacccgaacagttacttgaattacaaaagaaacaaggaaagtaattatggatgtacagcagttttttgtcgttgccgtttttttccttatcccgatattttgtttccgcgaagcatggaaaggctggcgcgcaggcgcgattgataaacgggttaaaaatgcaccggaaccggtgtatgtctggcgagcaaaaaatcccggactctttttcgcttatatggtggcatatatcggcttcggaattttatctatcggcatgattgtttatcttattttctatcgttaatattcccctctccagttaattattgagaataattattacttcacctgataagctgcggatatcacattcctaaccgcagctatttgtgaatcttttcacagtttaaattcccccgcacgcttagccttaatatcagtacattattatttactaaacgctcgccttaattacctatagcattaaggaagatcacatgccgcaacaaaattatctggatgaactcactccggcttttacgtctttactggcgattaaagaagcctctcgctgtttattatgtcacgacgctccctgtagtcaggcttgcccggcacagaccgatccggggaaatttattcgcagtatctactttcgtaattttaaaggcgctgccgagacaattcgcgaaaataatgccctcggtgccgtttgtgccagagtgtgcccgacggagaaattatgccaaagcggttgtacccgtgccggtgttgatgctcccattgatatcggccgcttacagcgttttgttactgattttgaacaacaaaccggaatggaaatttatcagcccggtactaaaacgctcggcaaagtcgcgattattggcgcaggtcctgccggattgcaggccagtgtgacactgacaaaccagggttatgacgtcacgatttatgagaaagaagcgcaccccggtggctggttgcgtaacggtattccgcaattccggttaccgcaaagtgtgctggatgcagagatcgcccgtattgaaaaaatgggcgtgaccattaagtgcaacaacgaagtcggtaacacactcacccttgagcagctgaaagcagaaaaccgcgcggtactggtcaccgtggggttaagtagcggttccgggctaccgctgtttgagcatagtgacgttgagattgccgtcgacttcttgcaacgtgcacgacaggcgcaaggcgatatcagcattccacaaagcgcattaattatcggcggcggtgatgtcgcgatggacgtagccagcacgctgaaagttctcggctgtcaggcggtaacttgcgtagcgcgtgaagagttagatgagtttccggcaagcgaaaaagagtttaccagcgcccgggagctgggcgttagcatcatcgatggattcacgccagtagccgtggaaggcaataaagtcacgtttaagcatgtacggttaagcggcgaactgacgatggcggcagataaaattattctcgccgtcggtcagcatgccagactagatgcctttgcggagttagagccgcagcgtaacaccatcaaaacacaaaattaccagacccgcgacccgcaagtctttgctgctggcgatattgttgagggtgacaaaaccgtggtctatgccgtgaaaaccgggaaagaagccgccgaggcgattcatcactatttagagggagcttgcagttgttaaattaatatttagagggagcttgctcatgttaacgaaagatcttagcattactttttgcggcgtgaagtttcccaacccgttctgcctctcttctagcccggtaggcaactgctatgagatgtgtgccaaagcctacgacacaggttggggcggtgtggtgtttaaaacgatcggcttttttatcgccaacgaagtcagcccgcgttttgatcatctggtgaaagaagataccggttttatcggcttcaaaaatatggagcagattgctgaacatccgttggaagagaatctggccgccctgcgtcggctgaaggaagattacccggacaaagtattgatcgctagcatcatgggggaaaatgagcagcaatgggaggagctggcgcgcctggtgcaagaagctggcgcggatatgatcgagtgtaacttctcctgtccgcaaatgacttctcatgcgatgggtagcgatgtcgggcaaagcccggagctggtagaaaaatattgtcgggcagtgaaacggggttccacgctgccaatgctggcgaagatgacgccgaatatcggtgatatgtgcgaagtggcgctggcggcgaagcgcggcggcgcagatggcattgcggcgattaacaccgttaaatccatcaccaatatcgatcttaatcagaaaatcggtatgccgatcgttaacggaaaaagcagtatttccggatattccggtaaagcggtaaaaccgatcgccctgcgcttcattcagcaaatgcgcacccatccagaactgcgcgatttcccaatcagcggtatcggcggcattgaaacctgggaggatgcggctgagtttttattgctcggcgcagcaacgttacaggtgaccaccggcatcatgcagtacgggtatcggatagtggaagatatggcaagcgggttgagccattatctcgccgatcagggatttgatagcctgcaggagatggtaggtctggcgaataacaatattgtcccggcggaagatttagaccgcagttatattgtctatccccgtatcaatcttgataaatgtgttggctgtggacgctgttatatttcctgttacgacggcggtcaccaggcgatggaatggagcgagaaaacccgcacaccgcattgtaataccgagaaatgtgtgggttgtctgctttgtggtcacgtctgcccggtgggttgtattgagctcggggaagtgaagtttaagaaaggcgagaaagaacacccggtaacgttgtaaaaccagagacgcatccggcatttggttcctgtcgccggatgcggcttgaacgccttatccggcctacaaaaccatacaaatcagtatgttgagcttattgtaggccggataaaacgcgccagcgttgcatccggcatttggctcctgttgccggatgcggcgtgaacgccttatccggcctacaaaaccacacagatcatgatgttatgtgcgtttatgaccgaatgcggaccacattcacatcatttcttacgcgcgtatttcagactatccagcgctacggcgaagataataatcgcccctttgatgatgtactgccagtatgggtttacgccgatatacgtcaggccatagttgatgacggtaaaaataattaccccggtcaccacgccaatcaccgtccccacaccgccgctgaagcttacaccgcctaccacgcacgccgcgatagcatccagctcatacataaagccgaggttgttggtggcagagccgatacgtccggcttctaacatcccgccaaaggcatagaacacgccagacaacgcgtagatcatcagcaggttcaggccgacgttgacaccagatacttttgccgcttccgggttaccgccaatggcaaaaatgttcttaccgaagcgggttttgttccacaacacccagacgaacgccaccgcaatcaacgcgtagaaggtgatgtaagagagacggaaactccccagcgcgacaaagccctgagcaaaggtagagaagccactgtcaaaaccagaaattgggctcgccccgacaaagtcgtaatagaggctgttgatgccatagacgatgatcatcgtgccgagcgtggtaatgaacggcgtcacgttgagataagcgataatcagaccgttgatcaaaccgatcaccgcaccaatggcacagacaatcagaataaccagcgcaatcggcatcgtcgccatttccgggaacactttgttggcgttatccatggactgcaataatgtcgcagccaccactgccgccagccctacctgacgaccagcagaaagatcggtcccctgggtgacaattaaccctgccacaccgagcgcgataataatacgcacgctactctgggtgagaatattacttaagttcaacagacttaaaaatgttgggtcctggaaaataataatcgccagcaaaactaaaagaacgacgtaaataccgccctctttcaggtaagtaagaaaacttttcttatttaacgcactcatgggaagcccctaatcttaaaggtgcaaagacgcaagacgcagaatttcgttttgcgttgttgtttttgtatcgacaattccggaaacgagaccattgctcatgaccagaatacggtctgttatccctaacaactcaggcatttcagaggagataataataatccccttgcctttcttcgccagttcggcaattaactgataaatttcaaacttcgccccgacatcaataccgcgcgtcggttcatcgagcattaatatttctggttgcgttagtagccagcgaccaataatcaccttttgctgattaccaccggagaggctaccaatttgcgtccgatgacccggcgtttttacccgcatgctatcaatcacccactgggtatcgcttttcatccggctgttatccagtaaaccaactttatttttgtagttgcgaatattggaaattaagctgttaaaaccaatatccagataggcataaattcccgtactgcggcgctcctcagttaccagtgcaaatccatggtttatggcttcgttggcattatggttattgatctgtttgccgtgcaacgttatggtgccagcgcttttctcgcgaataccaaataacgtctcaacaatatcggtacgtttcgcccccaccagaccggcaataccgaggatctcccctttatgcagatcaaagctgacatcgcgaatgctcggctggcgcagactcgtcaggttacgtacctcgaggatgacttcgcccggtttgttttctttgtcagggaaacgctggttaagagaacgcccaaccatcatggcgatgatcttgtccatcgtcagtcctgccagcggttcggtggcgatccactgaccgtcgcgcaatacggtaacttcatcacataactggaagatttcttccattttatggctgatataaacaataccgcagccgcgctcttttaatttacgaataatagtgaacagatgattgacctctttttcggttaagctagaagtcggttcatccataatcacaattttcgcgttataggaaaacgctttggcgatttcgatcatctgcatttggctaacggataatgtgccgacgcgcgcacgcggatcgatatcaatatccagttcgtcaaaaatcgctttggtttcgcggtacattttgtcctgatcgacaaacatgcctttggtgggatatcgccccagccacatgttatccatcacgctacgttgtaataccaggtttaactcctggtgtaccatgctaataccattttccagggcttcttttgcagaatggaaatcgatctctttaccctggaataaaatggtgccggagtctttttgataaataccaaacaggcattttaataatgtgctttttcctgcaccgttttcccccattaatgcatggatagaatgtggccggacttttaaattaacgttatcaagtgccttaacaccaggaaaggacttgttgataccgctcatttccaacaagtattccccggaggacggagtcgtactgctgaccatataattttaccttgttggccatacaataagggcgcagtaatagactgcgcccaatcagtcttatttcttgctgaattcagccaggttgtctttatctacgccaacataaggtacgcggaccactttgttgtcgattttccagttggtgccatcagccgcacctttaccatcggccaggtttttcgccagatcaaaggtcgctttcgcctggttgttagcatcgttcagtacggtgcccgccagtgcaccggatttcaccagcgccagcgcttctggcagcgcatcgacgccaaacaccggaatgctggacttgttgtgtgctttcagcgcttcaaccgcgcccattgccatcgcatcgttgttggcgataaccacttcgattttgttggcgttcgggccagacagccaggcgtccatcttatctttcgcctgagcggtgtcccacattgcggtatctaactgtaactgttcagttttgatgcctttatcgttcaattctttaatcacgtaagtggtacgtgcttctgcatccggatggcccggttcacctttcagcagtacgaactgaatctgaccgtctttgttcagatcccaaccctgattcgccgcccagtgtttagcaatcaaatcgccttgaataatgccggactctttggagtcagtgccaacgtagtaggctttgtcgtagctatccagcgccttacgagacggttctttgttgaagaaaaccaccggcacgttttgcccacgcgctttctcaatcaccgtacccgcagctgccgggtcaaccaggttgattgccagtgccttcacccctttcgccagcaatacgtcgatctgatcgttctgcttggactggtcattctgagaatcattcatcagcagctgaacatctggcgcggctttcgcatcttgctcaatagccttgcgcactacagacataaagttatcgtcgtacttatagattgttacaccaatgcgagtatcagcagcgtgtgcagcggcaccgaataacatgctggccatcacagcagacagggttaacaccttcttattcatggtatctccggtttttcttatgcagggtagtgcttgagataaatgctcggcggggcagtagagttaatgaagtgttactgaacgccgaagctcactttttaaaattcgttcttccatgcccggtaacgctccagaaaacggctttaattgttgttatgacgctgttacctcggcaaaagtgattattcactgttacatacgggttacaacgttaaaacggtgcaatcatagctatcacattgttaagatactgtgaaatcactcacagattgaaagcggttacatcgcctgatttgtactgttagtgatcgccgccgcattctggcgtgttgcgacagaatggcgacgcactaacgtcggcataaaacagtggctggcacgaggatcaatattgcctgctgccccctgcaaggccagttcggtggctaatttcgccatactagcaatgggataacgcacggtcgttaattgcgggtcggtgtaacgggcgatgggaatatcatcgaaaccgatgatactgagatgtaacggaatcgcaatgccattatcttttaatgctgtcagtgcgccagcggccatattgtcgttataagcaaatacagcggtaagttgtagattgcgccccagcagttcaaccatcgccgcctcaccgcccggcatgtccggcgtaccagcgccaatccagctttccggcggaataatatcctgctctttcaacgcactcatccagcctgctttacgcatggcgtcatcttcaatgccgtggctggaagaaagataaccaatacgttgatgaccgttattcagcaacatgcgcgtcgccattcgggcaccgctgagattatccaggcaaacgcaacgatgggcgtaccccggcacaacgcggttgattaacaccataccgggaatgttatccataaattgcgccagttcatcgtcactcaatgctttactgtgaacaatcaacgcattacaacgctggcgaattaacacctcaatggcgtgacgctctttttccgcttcatgatagctattgccgattagcacgtatttctgatgctgctgagcgaccagatccaccgcttttaccagcgcgccgaaaaacgcatcagaaacgtccatcaccaccacgccaatggtgtcgctaacctgagttgccagcgcctgggcattggcgtttggccgataatccagctcactcacggctttcattactgcttcacgcgtgtcggcactgaccagcgtgctgttattgagcacccgggaaaccgttgccacagagacgccagcctgacgcgctacatcacgaatggtgatcatattcactacctgttatgagattgcagtaaatgactgcttgctggcggctattttgtcagcactgaatacaggacttcgtgaatcgagtcacagcaatggaaacggttacagccgttttgttaacgaatgtgatccagatcgttatctacttgttttagatattgccggtccggcagcacgcaaagttaactgacgccagagccattccaccggcccctggcggaagtaacgcagccagataacagagaagaggatattcgccagccataccggaataacaaacgccagcagctccaggcggtcaaaatgcataaacaaaccgaggtggtaaaaaagcgtggtacaaatcagcgtttgcaatagatagttggtcagcgccatccgtccgacgcaggcgatcgcaagcaccagcttaaagcggctcaattgcggccagaagccataaaacaggctcgcatagccaatcgcctgaaacggcgcactcagttcccgcggcatttgaagtaagaaggcacaccagcgatacgcccagtccagctgccattgcagggcgatggcaggaaggttaatggtcaccccaatcgccaccagcacaaaaccagtacgacgatagtgacgtaagctgaactgccctttcagccagccgctgcgcatcagcgccgcaccaatgagcatcatccctgccagttgccagccatactgtgcgcccagtgccagtaaactgttgccaacaccatcggcacgattactgatcgcttcaacgccgccgtgaagcttccagtatttttcatacaaaatagcgcttgcatccggcgtccaggcgcggctggtctggctgtcggaaatcagccccaataacagcaaaacgccaagccccaccagataaagcatgacgcctgtattaaacaggctttttacgcttggcgcatcgcgcaccagccgccagcagattaagcccaccagcccgtaagccagcaaaatatcgccgtcccagaacaataaaccgtgaataaagcccaacaagactaacagcgttaaccggctctggatccagcgtctgccacggggcagcaacatttgcaggcccgcaccaaacagtagcgcaaaaagcgtgaggaatttcacctggccgatgagatcaagaaatgcccaagtccatgcatcccgcggcgtaatagcaccgtaccaggcgggattgagataagccgcctttggtagcccaaaggcgctgatgtttaatagcaggatccccagaatggcgacgccgcgaacaaaatcgagcgtgacgttgcgctccatggttcctgccttttaatcagttgtgatgacgcacagcgcgcagaaactcgtggcgcgtattctgactggatttgaacaatccaccaagagaggtcgttgtcgtggcactggttgcatcgcggatgccacgcgccttcacgcagtaatgcaccgcgtcgatgctgacagccacgttattggtgcccagcagcgtttgtagcgcaataagaatttgctgcgtcagacgttcctgcacctgcggacgctgggcaaagaactgcacaatgcggttaattttactcagaccgatcacgctatctttcgggatataggccaccgtcgctttgccatcgatggtaacaaaatggtgttcacaggtgctggtcagagtgatatcgcgcacggtgaccatttcatcgaccttcattttgttttcaatgagggtgattttcgggaaattggcgtaatccagaccggagaaaatttcatcgacatacattttagcgatgcgatgcggcgtttccatcaaactgtcatcagccaggtcgagattcagcagctgcatgatttcggtcatatgaccagcaataaggcttttgcgcgtttcgttatccatttcatgcacgggcgggcgcagcggtgtttccagtcctcgcgcaactaacgcttcatgaaccagggccgcttctttactgagacttggcatttatgatttctcctgcaggtgtgacgcctccgccctgcgtgggggcaaagttattaagctgatttacagcctgattattgtgcgtgaggcggcgcacataatccagtattcacagcgataattattgtaattgccgctgcctttcatcagcagatgttaaaacatcgttatgcaaatacggaagtgaaagttactcacagcacattgaataaacggtatgatgaagaaattgcaaacaacacaacaaggagccacgcatggaaatgctcgaagagcaccgctgttttgaaggctggcagcaacgctggcgacacgactccagtaccttaaactgcccgatgacgttcagtatctttctccctccacctcgtgatcacactccgccaccagtgctgtactggctttccggattaacctgcaatgacgagaacttcaccaccaaggcgggtgcccagcgggtagcggcggaactggggattgtactggtgatgccagacaccagcccgcgcggcgaaaaggttgccaacgacgatggctacgatttaggccagggcgcaggcttttatcttaatgccacgcaaccgccgtgggcgacgcattaccggatgtatgattatctgcgcgatgaattaccggcgctggttcagagccaatttaatgtcagcgaccgctgcgccattagcggtcacagtatgggtggtcacggtgcgctgattatggcgctgaaaaatccgggtaaatacaccagcgttagcgcctttgcgccaattgtgaatccgtgcagcgtcccgtggggaatcaaagcgtttagcagctatttaggtgaggacaaaaatgcatggctggaatgggacagttgcgcactgatgtatgccagtaacgcgcaggatgcgatcccgacgcttatcgatcagggcgataatgatcagtttcttgccgaccagttgcaacctgcggtactggcagaagccgcgcgccagaaagcgtggccgatgacgctgcgtattcagccgggatatgatcacagttactacttcatcgcctcttttatagaggatcacctgcgcttccatgcgcagtatttactgaagtgaaagtccgcccggttcgccgggcatcttctcatcagaagcgataatccactgccataaagtaacgacgtccgtcttcgttatagctgtagtcgtcacgactgagatccttgtcgccaaggttcagcacgcctgcgcgcagtttgacgtctttagtcacctgccaggccgcgccggtattccagatggtataaccgcccggtgttttagccgtcgcgctgtcggcgcgtttctgcccggtatagtgcccagaaacatagaaactccagtcttccagcgccagcggtttccagtccagcgtaccgttagcagtatggaacggcagatcggatagcggtttgttttcgccgttgctgacatcacgaccatcgttgtaggtgtagttgatgctcagtttccattcatcgttgaacggaattttcagttcggtttccacgccctgaatacgagctttgttaacgttgtagtagctaaataccggtatgcgccgtccgttagcgcccgtctcaaaaccaacaaagttttggtagcccggtgcagcgttgacgtcagacgtacggctgatgctgatacgatctttcacatcgttacggaaaacggtaacgctggattcaaccccttccagccagccttcttcacccatgtagtaaagccccagctcccaactttcgctggtttctggtttcagatccgggctacccacaatcttacatgcgccacggcaggaattgctcgtccagtcagggctaagttgcaacagagaaggtgctttaaatgccgtcgcccagccccctttcaccgttacggtgtcggtggcgttataaaccaggtaggcacgcggactccagtgttcaccgtaggtttcgtgatcgtccatacgcacgccggtcgtcagcgccagcggctcgaagatccgccattcatcttccacaaacagcgcgtactggctggcagacgttttggagctggttcccccggtcaggttcaccgcatcgctaagtttgtcgtgacgccattcaccgccaaccgtgagaaactgattaatcgccgtcagcggcaacgtgtatttgccgtcgaccgtattgctttcggaagttatcgggctgctgttgccagggtttttgttctcgactttctcaccgtagtatttcagttcgctggtgccgtaatcccaacgcccattatggctgacggagtagttctggcgttccaggcggtttttgtccaggctgtcggaatcacgatcctgacggtcgaaaccgtatccggcagtaaaatcgtgattttgattcggtgtccaggcaaattcgacattgccgtcgcggctggagaatccttcaatacgcggcgtttctccggtatcggtggtcgtactgttttgcgggtcatccttttcacgttttgccaggctgccgtaagctttcattcccagcacaccatcaattaatggtccactggtaaagaactgaccgttataggtgtcaccgcgatcgcgatgttcctgaatggtggtatcgacggtaacggtaccgctccatttctgaccgatttttttggtgatgatattcactacaccgccgagcgcatcggaaccgtacaggctgctcatcgggccacggaccacttcaatacgttcgatggaatcgaccgggatccagttcagatcgaaatcattgtggcggaagacggcattgcgggagttcacgcgtttaccgtcgacgagaatcagggtatagctgctgtccagaccacgaatactaacgcccttacggttatccccttcgttcgtcagttgtacgccaggcacttctttgaggacatccttcagattctgtaccggttttcgctgcaggtcttcctgggtaatgacgctgatactggcaggtgcatctttaagattttgttccacggaagatgcagtgacaaccatcgtttcgccatcatcatcgaccgctaacacaggccatgcacaagaaatagcggacaaacacagcccgacccgtacgaaagggttcaacctaaacattccatatctccatgaggtaactacgaaaataaaatgggttatcgctcacatcttcttcacgtccccttgcgtacggcagcatcgcggtggacttattttttatgcaggtgatcatcccagaaagccggaacagcctctgatttgtcagccttttttgattgcggcgtaacgataatgcaaacgataacaattatcaatccaaatgttaaattttatatccgcatgatttgtcagggaaatggaattgaaaaagccctctcggttgagagggcttagcaaggaagggaggaaacttatttcttatcgttctgcgggaacttcatttcgctgtagcgtacgaagtgagttcctttaatcagcttgtagccgaaccaaataatcaggaacagcgggataccaatatacgttgccgctacgccgccccagtcaatagtatctttcaggaacgcttcgtagttctggcccaaagtgataatcagacacagaatgaatgcgaagatcggccccagtgggaagaaaccactacggtacggcagatcgttaatgtcgtgtccctgcaatacgtaaccgcgacggaagcgatagtggctaatggcaatccccagccaggcgataaaacccgtcatcccggaggtgttcagcagccacaggtataccgtctggttgccaaacatggaggtcaggaagcacagaccggcaatcaccgtcgtcgcatacagcgcattacgcggcacgccaccacggctcagtttagcgaaaatgcgcggcgctttaccgtcacacgccagggtgtacagcatacgagtagacgcatacataccggagttacccgcactcagcaccgccgtcagaataactgcgttcatcaccgccgccgcagagagcagacccgcgtgctggaacaccagggtgaacggactaacgctgatgtctttaacatcgttacgcagcaggctcggatcggtgtacggaataatcaggctgataatcaggatcgcgaacacatagaacaacaggattcgccagaacacctgacgtaccgcgcgtggaatgtttttcgccggatcttcggactcgcctgcagcaataccgatcagctcggttccctggaaagagaagccgacaatcatagctacgccgatcatcgccgcaaaaccaccagcaaacggcgcttcgccgattgtccagttgctccagcccgcaggctgcgcgcctttgaagataccgataatcatcagcacgccaacgatgataaagacaataactgtcgtgactttgatcagactgaaccagtattccgcttcaccaaagccacgaacactgatgtagttcagcaggaagataacgccgaggaacaacgcactccagatccagcccggtgtatccgggaaccaccagctcatgaccagctgagctgcaaccaggtcaacggcgatagtcaccgcccagttgtaccagtagttccagcccagcgcgaagccaaagccttcttcaacatagttctgaccgtaagtggcaaagctaccggaaaccggcatatatgcagccagttcaccgagactggtcatcaggaagtaaaccatcaggccaatcagcatatagctgagcaatgccccgcccggacctgcctgagaaatcgttgcgccagaggcaacaaaaagacctgtaccgatggaaccgccaatggcaatcatcgtcaggtgacgcgcctttaattcacggcgtaagcccggcgcttctgtggttttagtttcggaaaccatacaaaaatgctatccatcttaaaaatgaggcgcgattgtagcagacgattggcaatccttccggcagaaatacacggttataagacaccttcatgatcgcccagggattataagtaaagcagccaatctcttttctggcgaatgcatgctgaaggcgctgcgtcacgaaatcgacacagcaccagcatgttcttgtacagcaacttaacgcggcacatttgcgggatcgcaatagtccagaaagcgccgtagcgcgttggaaaggtgtttttgccgatgatgtatacgccacaacgtacgcatcaggcgcggcagagggaccgcaacttcacttaatgtgcctgcctgcaattgatcttcaatcacacgtcggctcaggcaactaattcccaacccatgacgcaccgcatgtttgattgcctcggagttacctaattccatcgccatctcaaacttcggtaaatgactcagcaacagataatcgacaatctcccgcgtgccggaaccgcgttcacgcaggatccacggcgcagcggccagctgttctaaggtgaccggaccacgggccaacgggctagtcggcgcggcgaaaaccaccagctcgtcttccagccacggttcagaaatgatttcagtgctgtggcacggtccttcaataaagccaatatcaacgcggaaatccagcaccgcttgcatcacgtcctggctattcccaacgctaagttcaatcggcaactgcggataatcatggcgataacgggcgataactgcaggcagaatgtagttaccgatggtactactggcatagatacgaatcgcgccgttgtcttcgcgaaacagttgttcgatttcaaccgcctgttcaagcaatgccaacgcacgcggatagagcagccgcccgtgttcattaacaaccagtcttttccccacgcgatcaaacagttgcacgccaagctgcccttccaggtcggtcaaggctgcgctcactgcactttggctcaacgccagcatcacgctcgcctgggtggtacttccacttttcaatacttctgcaaaaacttccaactgccggagggtgatgtgcatagtcgcttaccacttataaagattaattataaatatataatcaattttatttttaaaccagttagtcgtaaccttatgcccggttaaaggagagggttatgacgaatatcaccttacagaaacaacatcgtacactgtggcattttattccggggttagccctgagtgcagttatcaccggggtcgccctgtggggtggttccattcccgcggttgcgggtgccgggtttagtgccctcaccctcgcaatcttgttggggatggttttaggcaacaccatctatccgcacatctggaaaagctgtgacggtggtgtgctgtttgccaagcaatatttattacgtctgggtatcattctttatggcttccgtctgacgttcagccaaattgccgatgtcggtatcagtgggatcatcattgacgtgttgacgctgtccagtaccttcctgctggcttgcttcctggggcagaaagtgtttggtctggataagcacaccagctggttgatcggtgccggtagcagtatctgtggtgctgccgcggtactggcgactgagccggtagtgaaagcggaagccagtaaagtaaccgtggctgttgcaaccgttgttatcttcgggaccgtcgcgattttcctctacccggcgatatatccgctgatgtctcaatggtttagtccggaaactttcggtatctacattggttctactgtgcacgaagtggcgcaggtggtggcggcaggtcatgccatcagcccggatgcggaaaacgcagcagttatttccaaaatgctgcgcgtgatgatgctggctccgttcctcatcctgctggcggcgcgtgttaaacagctgtctggggcgaacagcggcgagaaaagcaaaatcactattccgtggtttgccatcttgttcatcgtagttgccatctttaacagcttccacctgttaccgcagagcgtggtgaacatgctggtaacgctggataccttcctgctggcaatggcgatggcggcgctgggtctgaccactcacgtcagcgcgctgaaaaaagctggggcgaaacctctgctgatggcactggtactgtttgcctggctgattgttggtggtggtgcgattaactatgtgattcaaagcgtcatcgcataaaccactacatcttgctcctgttaacccgctatcattaccgttttcctccagcgggtttaacaggagtcctcgcatgaaatacattggagcgcacgttagtgctgctggcggtctggcaaatgccgcaattcgcgccgccgaaatcgacgcaaccgcgtttgccttgttcaccaaaaaccaacgtcagtggcgtgccgcaccgctcacgacgcaaaccatcgatgaattcaaagccgcctgtgaaaaatatcactacacaagcgcgcaaattcttccccacgacagttatctgattaacctcggacatccggtcactgaagctctggaaaaaagccgcgatgcctttatagatgaaatgcagcgttgcgaacagctggggctttctttgctcaacttccaccctggcagccatctgatgcagattagtgaagaggattgccttgcgcgtattgccgaatccatcaacattgcgctggataaaactcaaggtgtgacagcggtgatagaaaacaccgccggtcagggcagtaacttagggtttaaattcgaacatctcgcggcgattatcgacggcgtggaagataaatcccgcgtcggcgtctgcattgatacctgccatgctttcgctgccgggtatgatttgcgtactccagccgaatgcgagaaaacattcgcggattttgcccgtactgtcggctttaagtatctgcgcgggatgcaccttaacgatgcgaaaagcacctttggcagccgcgttgaccgccatcatagcctcggtgaaggcaatatcggtcatgatgcgttccgctggatcatgcaggacgaccgtttcgacggcattccgctgatcctcgaaaccatcaacccggatatctgggcagaagagatcgcctggctgaaagcgcaacaaactgaaaaagcggtagcctgaagatgaataaccgggaaaaggagatccttgcaattttacggcgtaacccgctgattcagcagaacgaaattgcggacatgctgcaaatcagccgtagccgcgttgcggcgcatattatggatttaatgcgcaaaggccggattaaaggcaaaggttacattctcaccgagcaggaatactgcgtagtggtggggacaatcaatatggatattcgcgggatggcggatatccgttacccgcaaagcgcttctcatcccggtacaattcattgcagtgcgggcggcgtgggacgcaacatcgcccacaatctggcgctgttaggccgtgacgtccatttgcttagtgtgattggcgatgacttttatggcgaaatgctcctggaagaaacgcgccgtgccggcgtgaatgtctccggctgcgttcgtttgcatggtcaaagcacaagcacgtatctggcaattgccaatcgagacgatcaaaccgtgctggcgattaacgatacccatctgctggaacagttgacaccgcaactactgaacgggagccgcgatttacttcgtcatgcgggcgtggtactggctgattgcaacctgacagccgaggcgctggaatgggtctttaccctcgctgatgaaatcccggtgtttgtcgataccgttagtgaattcaaagcgggcaaaatcaaacactggctggcgcatattcacaccctgaaacccactttaccggagctggaaattttatggggacaggcgatcaccagcgatgctgaccgtaataccgcagtgaatgcattgcatcagcaaggtgttcagcaactgtttgtttatttgcccgatgagagtgtttattgcagcgaaaaggatggagaacaatttttgctgaccgcgccagcgcatacgacagtagacagttttggtgctgacgatggttttatggcgggcctggtatatagctttcttgaaggatacagtttccgcgacagcgcccgttttgcggtagcctgcgcggcaattagccgcgccagcggcagcttaaacaaccctaccctgtctgccgataacgcgcttagtttagtgccaatggtgtaacaatgttgccggatgcgacgcttaacgcgtcttatccggcctacaaatcaggcaatttcagcaagtaaatgtaggcctgataagcttgcgcatcaggcaatgacactcaagctaaaccaataaagaacccggcaatggtcgcactcatcaagttggaaagcgtcgccgccgccagcgcccgtaaaccaagctgggcgatttccggcgcacggtgtggcgcaaccgcagaaaacgcccccaccaccaccccgatagaaccaaagttagcgaaaccgcacaacgcgaaggaaataatcgccacagttttagcatcgagagtgccagccgtttgcagatagggactgaaattgagataagcgacaaattcatttattgccagtttctgtccaatcaaactcccggcaagattcgcatcactccagtccacacccatcacccacgccagtggagccagcaggtaacctaaaatggactccaggctggcatgttcaaaaccaaaccagccaccaacgccgccgataataccgttaatcaacgcaattattgcaacaaatgccatcaccactgttgccacacctgcggcgattttcagcccggtcattgcccctgtcgcagcggcttcaataatgctttttggcggtgtttcggtgaaagagaggttattaaaggaaacctggctagattccgttgccgggcttaacaggcgggcaaacaagatcccgccagggatcgccattaaacttgccgccagcagatattccacaggcacgcccagtgcggcgtaaccaatcattgtgctaccagcaatgctggccatgccactacaaatcgctgtaaataattcattgcgattcagacgatcgataaagggtttgacgattgccggaatttcgttttgcccgaggaaaatggtggtgaccgcgacgaaactctcgatcttgctgatatttaatgctttctggaagataccgccgagaattcgaattaaaatccccatcacaccgatgtagtagagaatactcaccagcgcggtgacgaagataattgccggtaacaccctgaaaccaaagataaatcctgcaccatcaaataaggtatccattttcggtccgaccagagaaccgaagataaatgcgctacccgcgtcgctgtacgccatcactttatgcacgccaaaagcgactttttcagcgacccaacgccctggcggtaaccaaagcataatgccgccaatcacgacctgtaacactaacgccgcgccaacggtacgcaggctgatcttcttcttgtttacactcagtaaaaacgcaatcgtcagcaataccaccattcccagaacacttctcatgacatccatagtgattatctcttcatgtcatattgggcgacggctttctgcccatcagaaatagccaggcctgcatcttgcgataccggcccggcttgttatcaacacttaatgggttttgatgtagccgcgcacgcactcttcgactaatccccagaaccagtctgtatcaatagtgatgccgactttggtattggcgggcttgccaagaacgcccagctcgtcgcagacggtacgcccatagcaagggccactgttgacgtccacttcgacgtacatctcctgggttttaatgccatcagggttaatcagataaccgatgcaggtggcgtcgtgcaccgggccgccagcaaggccgtagttttcgaactgcgttttgagagtgaagttcatgatgtcgctgaacagctctccggcggggccgcctgccctttccatccgagcaatcacgtccggggtgcaaacggtctggttggtgagatcgaggcccatcatcactaatggaacgccggaggtgaacactacgcgtgcggcttccgggtcggcaaagatgttgaactcggcagatggcgtgaagttgcctgtaccgtaagcgccgcccattagcacaatttcacggattttgggcaggatcgcgggttgcatacgcattgccaccgcgatattactaagcggaccaaccggcaccagagtgatatcgccatcgcttgccatcagggtatcaatgatatatttcaccgcatgagtgctttctgcctggcgggtcagcggctcgaataccgggccatccagtccggtttcaccgtgaatattatcggcaacgatttgttgacgcataatgggctgcggcatccccgcataaaccggaacattaatctccagtttctggcaaacattcaggccattaattaatgttttatcaagcgtctgattacccgctacaatagtgatgcctaataaatctattgccggatgtttcgccgccatcattatagcaatagcatcatcatgacccggatcacaatccagaataatttttctcttttccattgtttatttcctctgtttccagttgcgttattttttctacagcaaagaaaattcgaccgggccgatgattgaatcttaacaacagcgtacgtatgctaaatatgagaaatctcatagcggataaacatcgtgaaagaaatccacaataatgatcttaagcagcaattgatgagtgaatccgcgtttaaggattgctttttaacggatgttagtgccgatacgcggctgtttcattttttagcgcgtgactacattgtgcaggaagggcaacagccgtcctggctgttttacctgacgcgaggccgcgccaggctttacgccacgctagctaatggtcgcgtgagcctgatcgatttctttgccgccccctgttttattggcgagattgagttaatcgataaagaccatgaaccgcgtgcggtgcaggctattgaagagtgttggtgccttgcgctccctatgaaacattaccgtccgctgttattaaacgacacgctatttttacgaaaactctgcgtcaccttaagtcataaaaattatcgtaatattgtttctttaactcagaatcaaagttttccgttagtgaatcgcctggcagcatttatattactcagccaggaaggtgatctttatcacgaaaagcatacgcaagcggcagagtatttaggcgtttcttatcgacatcttttatatgttctcgcgcagttcattcacgacggtttattaattaaaagcaagaaagggtatctcattaaaaacagaaagcagttgagtggactggcgctggagatggacccggagaataaattctccgggatgatgcagtaaaaattattttcaatagcgcgattgccggatgcaacgcttaatacgttttatccggtctacaaatcgagcattacgccagaccaataaagaacccggcaatagtcgcactcatcaggttggaaagcgttgctgctgccagcgcccgtaaaccaagctgggcgatttccggcgcgcgttttgggctaatagcgctaaatgcgccaacgacaacaccgatagaaccaaagttagcaaaaccacaaagcgcaaaggagataatcgcaatggttttcacttccagcgtgccgcccgtttgcaggtatggggagaaactcaggtaagcgacgaattcgttaatcgccagtttctgcccaatcaggctacccgcaagattggcatcactccagtccacacccatgatccacgccagcggtgccagcacatagccaaaaatactttccagagaggcattggcgaaaccaaaccagccgccaattccgccgataatgccgttgatcagcgcaataattgcgacaaacgccattaccaccgtcgccacaccagcggcgatttttagcccggtcatcgcaccgctcgccgccgcttcgataaagctttttggcggcgtttcgctgaagctcagattttcaaatgtgacctggctaggctcggttgccgggctaagaatacgtgcaaacaaaatcccgccagggatcgccatcaggcttgccgctaacaggtagtcaattggtacgcccattccggcataaccaatcatcatgctaccagcaatggacgccatcccgctacaaattgcggtaaacaactcgttgcgattcatgcgatcgataaacggtttaacgatcgccgggatctcattttgcccgaggaaaatagtagtaaccgcaacaaaagattcgattttgctgatgttgagggctttctggaaaatgctgccaaggatgcgaatcagcagccccatcacgccaatgtagtacagcagactgatgagcgcagtaacgaaaataatcgccggaagtacgcgaaaggcgaagataaaacccgcaccgtcaaacaggacatccattttcggcccaaccaggctaccaaaaatgaaggcgctaccggcatcactgtaagacatcactttatgaacgcctaatgccgcctgttctactgcccattttcccggtgggaagtagagcatgatgccaccaatagcgatttgcagcagcagtgcggctccaaccgtgcgcaaactgatgctctttttattcacactcaacagaaatgctattgccagtaacaccaccatccccacaacacttctcattatatccataatgattttcccttcatgccggtaaacccggcgtcagcgccaggttttggtatgcttgatgagtacgggcgacggctttctgcccgtcagaaattaacccgcgagacgctgatattctttggcaatttcgctcgccagaatggcgttgttgaacaccagctggatgttggatttcaggctgtcaccgccggtcagttcagcaacgcgcgccagcaggaatggcgtactttctttaccaatgactccctgagcttcagcttcagctaccgcctgatcgatcgccgcattgatagtgtgttccggcatagcaaactgttccgggatcgggttcgctaccacgaggccaccgttcagaccgctttgccatttcaccaccattgcacgggcaatttcgctggcgctgtcgagacgaatgctgacgtcaaacgggctggtgcggcagaaaaacgcaggcagcgctttagtctgatagccaattaacggcacaccgaaggtttctaaatactcagtggttaatcctaaatcgagaatagatttcgccccggcacaaacaacggtgacattagtatttgccagttcttgcaaatcggcagaaatatcgaaggtatgttccgccccgcgatgcacaccaccaattcccccggtggcaaatactttaattccggcaagcgccgcaataatcatcgtactagccacagtggttgcgccattttttccggcggcaacaacaaaaggtaaatcgcgacgactaactttggtcacgttatgcccttcacgacccagtaattcaatttcttctttgcttaaccccactttcatcacgccgccaataatggcgatcgtggcaggtacagcgccctgtttacgaatagtttcttcaacttcaattgcggtctgggcattttgtgggaacggcatcccgtgagaaataatggtgctttccagcgccacaaccggttttttgttttttaaagcgtcctgcacttccggggaaatttgtaataattcaggggaaatttttaattcagacattctgcgttctccactaagcttataacgttggcaatgcttaaatcggggttattggtgtattcacaggagagcgccatactgctacatccctgtgcgaaacgaacagattcggcaaacggcattccgtctacccaacagctagcaagtcccgccatcatggcatcgcccgctccggtaacattaataacattggttttgatcggcgcagaccagccactttcaccgctgatatcgctgtaataaacgccgtcgccgcccatgctcaataccagtcggttcaggccatgttgatggaaccaggcagcaacttttgccacatcttcacgcccactcagcgcaatcccactcagggtttccgcttcaaggcggtttggcttgagagtgtggatctgatttagacggtcgcgcactttgacacatttccatgcgctaaccggatcgacaaatacgggtacgttggcggcattatccagaatccatgccagtgcctcttcactgatattacagtccgcgacaatgacctttgccctctgaataaattcaccgtgctgtgcgagatattcagctgtaatagcgttgctaatattcatgtcatttatagcaaccagcatttcaccggtattatcgagtaaacttaaataactgctcgtattttctcccggcacaatcaggcatttatcgacataaacgccagattgattggtttgcgttagcaggctttgaccataaaaatcactgcctacggcgctcagtagccaggctttgttacccagcaacgccaggttttgtgcaatattgcgccctactccaccaggcgtaaattttattttacctggattactatccgcataatttaaactttcatgactatatccggcgacatcaatattcgcgctacctataattacgacataatccttttcgcgcatagcacgtcctctggtaaaaaattaccaaccctgtcaatccacaagaatatagatactgcaaagacggtttaaacatgtgttcatatttaaacatgtgctcatagtatgcatgttttacgtaaagtaaattaccgccagagaggcaaaatgggcagatttgagcaggctcacaaaatgcgattaaatgcctgaattacaaaagcgaggaatttgtgacgggatgcacagaacagaacaataaaaaagggcagaaaataatctgcccttgaggaaataacctgagtgtttgatgaacgtttgaagtttctactgaaagataaaaccatttaaattcataaaattacattcacaaaccggtcattctctttgcgctcatcaaatgttacaggacaggaaatttctgccctgtaacacaccttttattacgctgctttcgctactgcgtccacttccggacgtttcaggaaggcataggccaaacccgccaccagcgtaccggcaataattgctaccaggtaacccaataccggcgtaatagcgccagggatcagcagaacaaacagaccaccgtgcggtgccatcagtttcgcaccaatcgccatactgattgcgccagtcagcgccccacccacgatacagcacggcagcacacgcatcggatcacgagcagcaaacggaattgcaccttcgctaatgaagcacagtcccaataccagagcggctttgccaccttcctgctgcgctttgtcgaatttgcgacgcgccaccattgttgccagacccattgccagcggtggcaccatacctgccgccataatcgccgccatcgggccataggtttgagtactcagcagacccacaccgaatgcgtacgctgctttgtttaccggaccgcccatgtcagtacacatcatgccaccgaggatcgcccccagcagaaccgcattcgcagtccccatggtctgcagccagtgagtcagcccttcgagaatgccagcaactggtttaccgatcaggtagatcatcgccagaccgaccaccagactggaaattagcggaatgatcaggatcggtttcagcgcctccatactctgtggcagtttcaattgcgtactgattaacttcgcaatgtaaccagccaggaagcccgcaataataccaccaatgaagccagaaccggtgctgaccgccagcataccgccaatcagacccggagtgaggcccggacgatcggcaatggaaaaggcaatataacctgccagtaccggcaccatcagcgcaaaggcactaccaccaccaatctgcatcagcgccgcagccaacgtacccggctctttaaacgcttcgataccaaaagcaaaagaaagcgcgatacacagaccacctgcaacgaccatcggcagcatgtaagaaacgcccgtcagcaagtgacggtatgcgcctgcactctctttcttactttcagtggtcgccgtttgagctttgcccgccggttcatacggcgttgcttcagcaaccgctttatccagttcctgcgcggttttcttcagcgccagaccggtagaggtacgatacatcggtttaccagcaaatttcgccagatccacttcgatatctgccgccacaatcaccagatccgctgctgcgacttcttcgggagtgattgcattacccgcgccaacagaaccacgggtttcaactttcacccaccagccacgttttttcgcttcggtttcaatggcttcagccgccataaaggtgtgtgctacgccagtcgggcaagcagtcaccgcaactacgcgtttcggaccgctggcggcaactggtgctgtcgcagcgaccggcgcagtgtaaggtttcgcatggcctttggcttcactcaggaacagctcagggtgcgcaactgcccgggaaatatcgcccagccagacatttttaccgttcagcgcgctgtcgttcgggatggaatcaccgagaacaatcgccatttcagcgtcgttcggattgtcgatgatttccagttttgcttttcgcgccgccgcgcccagcagggtcttcgccatataggcgcgtgcctgaccgagattagcgtcaataatcagcagcgttttcattatgcctctcctgctgtcagttaaaaggttgtaagtcgacgcgcgccatcattgcggccaactgcggacgatcggtaatacccacattgctttgacttaccgccagggctgcaacagctgtcgccagacgcagtgtgtgttcactggattcacgcatcagcaagccataaatcaggccaccaaccatagaatcccctgcgccaacggtgcttacgacatcgacactcggtggtttggcgatccattcgccggaggcattaacccaaagcgcgccttcggcacccagactaataacaacatgcgcgatgccttgttcacgtagcgcatgtgcagcttcaatcacatctttcatttcaggcagtttacggcctgcccagatttccagctcgcggcggttaggtttcaccagccacggtgccgctttcaaacctgctactaacgcttcacggctactatcaaagataatgcaaggacactgactacgcaggcgagtcatccagtcggtgaacgcttccgggctgacgccactcggtaagcttccgctgacacagaccatatcgaactgaccgagccagctcagagaatcagtcacaaagcgttcccagtcggcgggggtgacttcaaaaccgctgaagttgaagtcggtcacttcgccgtctttttccgtcagcttaacgttaattcgggtgcgcccctgtacaacctggaaacggttggcaatgcccagctcgctgaacagttgctgaaaaccatcctgattgtctttacccaggaagccgccaacggtgacatcaattcccaggtcttttaatactttggccacgttgatgcctttacccgccgcatgcagaccggtggttttcaccaggttcacttcgccgcgttcaatttccgggcagaaaccaacaaggtcataagccggattaagggtgatagtagcaacacgtctgctcattatgcgccctccccaagaccagcagcgatagcgtcgccgattgctttcagcgcctgttcagcatctgcaccctgggcggtaaagcgtaggcgatgacctttcttaacgccaagtgccacaactttcatcagactacgtccgtttgccggtttgccggtaccatcaaggtttgtcacggtaatatcactgttaaattgtttaatggtattgaccagcatggtacctggacgagcatgcaggccgtgttcattgcgcaccacaaactccgcgcttaacacgtcgtcggtcggcgcatcatcgctggtcagcagcgccagcaacgttgccgcatccgctttcagcaagcggtcagctttattgtcgagcaataaatcagcgagacgcttaagaaccgcgatgggctgatcgtcattcatcgccacactcaccagcatggctgccgtttcgccgtccacatcaaaagcatttgccgcacggcttaccgcaatcgcgctacgcagattgccttcggcgctatcgctcagccagataccctgtccgagattcagcggttgttcattgatggctttggtgacgaaagtggcgtcaactgcccccgcctctttcagacgcgcagcgttcagcgcctgaagagtcagcagatcgctggcgacgatatccagtgtcagcatttcgttgtcgagcttcagctgctcactctgcttttcgcccatcagtaatgcgcgaagttcttctgctgttgttgcactcttcagttgttcagcaacggaatcatcgctcagtacgtgggtcagctggcgtagcaggcccagatgttcatcgctgctggcagcaataccgattgccacgtacgctacctgaccgtcaccccaggtgacgccttccgggaactgaaatacctgaacgccggttttcagcacctgatcgcgggtgtcggtagtgccgtgtggaatagcaataccattgccgaggaacgtactggtttgctgttcgcgcgccagcatgccattgacgtagccttctgctacattaccggcctgcaccagcgccgcagcgacctggcgaatcgcctcttctttgtctccggccttttcgcccggatggatgtcctgtacggataactggaacatagttctcctctcttgctgaattgaaacgattcagcctctatgagaaaaaaagcgccaacctggcttagggttaaagacaagatcgcgctgaaacgtttcaagaaagcataatacttctgtttcagcacgcaaggaaagccgtaaagttatgagcaaaagtttgatgtgctgcacaattttttgccatttttcctaattgctgatgggaaaatccgttatcagcaatttcatttcagcagcgtcagcagccaatcagcaacagtgaaatggcattttgactattcgtggcgcttttgatttcgctgtctgtttattttctgacaagcagcgtaaactccgcgtcttcctcttccagtgatcgaccagcatgcataactcccccgcagtctccagcgcgaaaagctttgacctgaccagcacggcgtttttaatcgttgcctttctcaccggtattgcgggcgctctgcaaaccccgacactcagtatttttcttaccgatgaagtacatgcccgtccggcgatggtgggattcttctttaccggcagcgctgtcattgggattctggtaagtcagtttctcgccgggcgctctgataagcgcggcgatcgcaaaagcctgattgtcttttgctgcctgttaggcgtgctggcctgcaccctttttgcctggaatcgcaactactttgttttgctattcgttggcgtctttcttagcagctttggcagcaccgctaacccgcaaatgtttgcccttgcccgtgaacatgccgacaaaaccggacgtgaggcggtgatgttcagctcttttttacgcgctcaggttagtctggcatgggtcattggcccaccgctggcttatgccttagcgatgggtttcagctttacggtaatgtatctgagcgcagcggtagcgtttattgtttgcggtgtgatggtgtggctgtttttaccgagcatgcgaaaagagcttccgctggcgaccggcacgatcgaagcgccgcgccgtaaccgtcgcgatacgctgctgctgtttgtcatttgtacattgatgtggggcagcaacagcctgtacatcatcaacatgccgctatttattatcaacgaactgcatcttcccgagaaactggccggtgtgatgatggggaccgccgccgggctggaaatcccgacgatgttgattgccggatatttcgccaaacgtctgggtaagcgtttcttaatgcgcgttgctgccgtgggtggcgtctgtttttacgcaggaatgctgatggcgcatagtcctgtcattctgttgggcttgcagctgctaaatgctatttttattggcattctgggcggcatcgggatgctctattttcaggatctgatgcccggtcaggcgggtagtgccaccacgctctataccaacactagccgcgtgggctggatcatcgcaggaagtgtggcgggcatcgtcgccgagatctggaattatcacgctgtgttctggtttgcgatggtgatgattatcgccactctgttttgcttactgcggattaaagatgtttaaggcgcggtcagcatttccagatcgataagccaggtcatggcctgctgacggctgttaccgcacatttcagcgctggcttgtaagcctgcacagactttcggtcgcagtgggctggtgaaaattttacagcgttgctgttcatcaagctgaatgcagggcgtattggcgggcttgccatctggcataccgggaatagggctggaaatactaggggcagtgcaacacgccccgcaacccggacggcattccatacgttgttctcttaaggttaaccaccggattgatgagcgcgcacagtaccaccttttttgcaccagcaaaagtgcgaataccacttgcccgaaaggcccgtcgcgagtactttgtcgcgatatttttgacattttcgactacaggaatttttcgatgccaagagcgaacgaaattaaaaaaggtatggtactgaattacaacggcaaactgctgctggttaaggatattgatattcagagccccactgcccgcggtgccgctacgctgtacaaaatgcgtttttctgatgtccgtaccgggctgaaagtagaagagcgtttcaaaggtgatgatatcgttgacaccgtgacgctgacccgccgttacgttgacttctcctatgtcgatggcaacgaatatgtctttatggataaagaagactataccccgtataccttcaccaaagatcagattgaagaagagttgctgtttatgccagagggcggcatgccggacatgcaggtgctgacctgggacggtcaactgctggcgcttgagctgccgcagaccgttgatctggaaatcgttgaaaccgcaccaggcatcaaaggggcatctgccagcgcccgtaacaaaccggcgacattgagcactggtctggtgattcaggtaccagaatacttaagcccgggcgaaaaaattcgtatccatatcgaagaacgccgttatatggggcgtgctgactaacttcagccgcatgcagaaaagggatagctcaggctgtcccttttttaatttattataccaatcttctattttgcgcttcctgaacaccttacgccctcaattttcactcgttgattgatcgccctcacacttcatcgcattaacaatccagaccaatttcaattgctgtcatataactttacactgtcgttgttaattaatcgttactaagacgtgactcctatgaatacaatcgcctccgttacgctcccgcatcatgtacacgctccacgctatgatcgccagcagttgcaaagtcgtatcgttcattttggctttggagcctttcaccgcgctcatcaggcgttactgaccgatcgtgtgctgaatgcccagggcggcgactgggggatctgtgaaatcagcttgttcagcggtgatcaactgatgagccagctccgcgcacagaaccatttatataccgtgctggagaaaggtgcggacggcaatcaggtgataattgtcggtgccgttcacgaatgccttaatgcaaaactggattccttagcggcaattattgagaaattttgcgagccacaggtggcaattgtttccctgacgattaccgaaaaaggctattgtattgacccggccaccggtgcactcgacaccagtaatccgcggattattcacgatctacaaacccctgaagaacctcactccgcaccgggtattctcgtcgaagcactgaaacgccgccgtgagcgcggccttacaccgtttaccgtgctctcctgcgacaatattcccgacaatggtcatgtggtgaaaaacgcggtgctgggaatggcagaaaaacgtagcccagaactcgccgggtggataaaagagcacgtcagttttccgggaaccatggtcgaccgcattgttccggctgcaaccgacgaaagtctggtggaaatcagccagcatctgggggtgaatgatccctgcgcgattagctgcgaaccgtttatccagtgggtggtggaagataacttcgtcgctgggcgtcctgcctgggaagtcgcaggtgtacaaatggtgaatgatgtcctgccatgggaagagatgaaactgcggatgcttaatggcagccactcttttctcgcttatctgggttacctcagtggattcgcccatatcagtgattgcatgcaggatcgcgcatttcgccatgccgccagaacattaatgctggatgagcaagcgccgacactgcaaattaaagatgtcgatttaacacaatatgcggataagttaattgcacgttttgctaatccggcgctgaaacataagacctggcaaatcgcgatggatggcagccagaaattaccgcaacgcatgctggcaggtattcgcatacatcaggggcgcgaaacggactggagcttgctggcattaggcgttgcaggctggatgcgttacgtcagcggcgttgatgatgccggaaatgccattgatgttcgcgatccgcttagcgataaaattcgcgaacttgttgcgggcagcagcagtgaacaacgcgtaaccgccctgctttccctgcgtgaagttttcggtgatgatctgccagataacccgcattttgtgcaggccatcgaacaagcctggcaacaaatcgtacaattcggcgcacatcaggcgctattaaacaccctcaaaatttaacgatttctgcggttaaagcggatgaagctcaccttcgtccgctctccccttctcttttctgccttttttagccaggattaacgctcagttaacttaccagagtattgcggagccgttgtgaccaggaccaacctcatcaccggttttctcggcagcgggaaaaccacgagcattcttcatctgttagcccataaagatcccaacgaaaaatgggcggtactggttaatgaatttggggaagtcggaattgatggtgctttgctcgccgatagcggcgcattgctgaaagagatccccggcggctgcatgtgctgcgttaatggtttacccatgcaggtagggttgaataccttactgcgtcagggaaaaccagaccgcttgttgatagagccgaccgggctgggccatccgaaacagatcctcgatctgttaaccgcaccagtctatgaaccgtggatagatctgcgcgccaccttgtgcattctcgatccgcgcttgctgctggacgaaaaaagcgccagcaatgaaaacttccgtgaccagctggctgccgcagacatcattgtcgccaataaatccgaccgtacgacgcccgaaagtgagcaagcgctacagcgttggtggcagcaaaatggtggcgatcgacaattaattcacagtgagcatgggaaagttgacggtcatcttctggatttgccgcgtcgcaatttagccgagttgcccgccagcgccgcgcattctcatcagcatgtcgtgaaaaaagggttagcagcgttaagcctgccagagcatcaacgctggcgtcgcagtctgaacagcgggcaaggatatcaggcctgcggctggatattcgacgctgatacggtattcgacaccattggcattctggaatgggcgcgacttgcaccggtggaacgcgtcaaaggcgtgctgcgtattcccgaagggctggtgcgaatcaaccgtcagggcgatgacctgcacattgaaacgcaaaacgttgcgccaccggacagccgtattgagctgatttccagcagcgaagctgactggaatgccttgcagagcgcgctgttgaagcttcgtttagcgactaccgcgtaaggttgcctgcgtttttcagtaagataattagagaaaatatgattaaaaatttgccgcaaatagtgttgttgaatattgtcggcctcgcgctgtttctttcctggtatatccccgttaatcatggattctggttgccgattgatgcggatattttttatttctttaatcagaaactggtcgaaagtaaggcctttttgtggctggttgcattgaccaacaatcgcgccttcgacggttgtagtctgctggcgatgggtatgttgatgctgagtttctggctgaaagaaaacgcccctggcagacgacgtatcgtgattattggtctggtcatgctattaactgcagtggtattaaaccagctgggtcaggcattaattcctgtaaaacgggccagcccaacattgacttttaccgatattaaccgcgtcagcgaactgctctctgttcccacgaaagatgccagtcgagatagctttcccggcgatcacggcatgatgctgcttatttttagcgcattcatgtggcgttatttcggcaaagttgcaggccttatcgcccttattatttttgtggtttttgcatttcccagagtaatgattggcgcacactggtttactgacatcattgtcggtagcatgaccgtgatattgatcggtttgccctgggtgttgctgacgccattaagtgatcgattaatcaccttttttgacaaaagtctaccaggaaaaaacaaacatttccaaaacaaataactcacagtaattaacatcatcagggttatttttatagtgaggataatcctgatgatgcgcaccgtgctttcatctatcgaacgcaaaaatcattctctaagtaaatgaatggattgcatgcgtttcactcaattgtactttaattgaccaaccccgcttattaactttctgtatcactttttcttataaaaaatcatgtaaaaccgctcgccaagaccgcaccaatcgggtaatctcgaactcgttttgcctcggcggtagattatcctcacagcatataattttgtgcgttagtccacagatttggccttaaggaattgtttcaacatgcccaggtaattagtctcgtgtcgcttggcatttttttataacgatatttgtcgttaaggacttcaagggaaaacaaacaacatggtcaaatctcaaccgattttgagatatatcttgcgcgggattcccgcgattgcagtagcggttctgctttctgcatgtagtgcaaataacaccgcaaagaatatgcatcctgagacacgtgcagtgggtagtgaaacaagtagtctgcaagcttctcaggatgaatttgaaaacctggttcgtaatgtcgacgtaaaaagccgaattatggatcagtatgctgactggaaaggcgtacgttatcgtctgggcggcagcactaaaaaaggtatcgattgttctggtttcgtacagcgtacattccgtgagcaatttggcttagaacttccgcgtagcacttacgaacagcaggaaatgggtaaatctgtttcccgcagtaatttgcgtacgggtgatttagttctgttccgtgccggtagtacgggacgccatgtcggtatttatatcggcaacaatcagtttgtccatgcttccaccagcagtggtgttattatttccagcatgaatgaaccgtactggaagaagcgttacaacgaagcacgccgggttctcagccgcagctaataaaccgtttggatgcaatcccttggctatcctgacgagttaactgaaagcactgcttaggcagtgcttttttgttttcattcatcagagaaaatgatgtttccgcgtcttgatccaggctatagtccggtcattgttatcttttaaatgttgtcgtaatttcaggaaattaacggaatcatgttcatacgcgctcccaattttggacgtaagctcctgcttacctgcattgttgcaggcgtaatgattgcgatactggtgagttgccttcagtttttagtggcctggcataagcacgaagtcaaatacgacacactgattaccgacgtacaaaagtatctcgatacctattttgccgacctgaaatccactactgaccggctccagccgctgaccttagatacctgccagcaagctaaccccgaactgaccgcccgcgcagcgtttagcatgaatgtccgaacgtttgtgctggtgaaagataaaaaaacattctgtagttctgcgaccggtgagatggacattccactcaatgaattgattccggcgctcgacattaataaaaacgtcgatatggcgatcttacccggcacgccgatggtgccgaacaaacccgcaatcgtcatctggtatcgcaaccctttgctgaaaaatagcggcgtctttgccgctctgaatctcaacctgacgcctagtctcttttatagtagtcggcaggaagattacgatggcgtcgccctcattattggcaatactgcgctatctaccttttctagtcgtttgatgaacgttaacgaattaaccgacatgccagtccgtgaaactaaaattgcgggcattcctctgaccgttcggctttatgcagatgactggacatggaacgatgtgtggtacgcatttttactgggcggcatgagtggaactgtcgttggcctgctctgctattacctgatgagcgtacgtatgcgccccggcagagaaatcatgaccgccatcaagcgcgaacaattttacgtggcgtatcaaccggtggtggatacacaagctttgcgagtaacgggcctggaagtactgctacgctggcggcatcctgtcgcgggagaaattcccccggatgccttcattaactttgccgaaagccaaaagatgattgtgccgctgactcagcacctgtttgagttaattgcccgcgatgccgcagaattagaaaaagtgctgccggtaggcgtcaaatttggtattaacattgcgccggaccatctgcacagcgaaagctttaaagcagatatccagaaactgctcacttccctgcccgcacaccatttccagattgtgctggaaattaccgagcgcgatatgttgaaagagcaagaagccacacaactcttcgcctggctgcacagcgtcggcgtagaaattgctattgatgacttcggcaccgggcacagcgcgcttatctatcttgagcgttttacgctcgattatctgaaaattgaccgtggatttatcaacgccatcggtacggaaacgatcacttcccccgtacttgacgcggtgctgacgctggcgaaacgcctcaatatgctgacggttgctgaaggggtcgaaacgccggaacaggcgcgatggctaagcgaacgcggcgttaatttcatgcaaggctactggattagccgcccgttaccgctggacgattttgttcgctggctaaagaaaccgtatacgccgcagtggtaaggtgtgcttacgtcccttattattcatagtgaaagcatgccggattgcggctaatgatgagtaaaaggaaatccgttgcagatgattgtgcgcatactgctgctgtttatcgctctgttcacctttggtgtgcaggcgcaggctatcaaggaaagctatgcctttgccgtgctgggcgaaccccggtacgcgtttaatttcaaccattttgattatgtgaaccccgccgcgccaaaaggtgggcagataacgttgagtgccctcggcaccttcgataatttcaaccgctatgcactgcgcggcaacccgggcgcacgcaccgagcagctgtacgacacgctatttacgacttccgatgacgaaccaggcagttattacccgctgattgctgaaagcgcacgctatgctgacgattattcctgggtggaggtcgctattaatccgcgcgcccgttttcatgatggtagccccattactgcccgcgatgtagagtttacttttcaaaaatttatgaccgaaggcgtgccgcaatttcgtctggtctacaaaggcaccaccgtcaaagccattgcaccgttaaccgtgcgcattgagttagctaaacccggcaaagaagatatgctgagtctgtttagcctgccggtatttccagaaaagtactggaaggatcacaaacttagcgacccgctcgccacgcctccgcttgccagtggtccgtaccgcgttacgtcctggaaaatggggcaaaatattgtctattcccgtgtgaaagattactgggcagcaaacttaccggtaaaccgtggacgctggaatttcgacaccattcgctacgattattacctcgatgataatgtcgcctttgaagcgtttaaagcaggtgcctttgatttgcgtatggaaaacgacgccaaaaactgggccacgcgttataccggtaaaaatttcgataaaaaatacatcatcaaagatgagcaaaagaacgaaagtgcccaggatacgcgttggctggcgtttaatatccaacgtccggtattcagcgatcgccgggtccgggaagctatcactctcgcctttgactttgaatggatgaacaaggcgttgttttacaatgcctggagtcgcacgaacagttattttcagaataccgaatacgcggccagaaattaccccgacgccgcggagctggtgcttctggcaccaatgaaaaaagatctaccgagtgaagtcttcacacaaatctaccagccgccggtatccaaaggcgatggctacgatcgtgacaacctgttaaaagccgacaaacttctcaacgaagcgggctgggtgctgaagggtcagcaacgcgttaatgccacaacgggtcagccactcagctttgaattattgcttcccgcaagcagcaatagtcagtgggtattgccgttccagcacagcctgcaacggctgggtatcaacatggacattcgcaaggtggataacagccaaatcactaaccgcatgcgcagtcgcgactatgacatgatgccgcgcgtatggcgggcgatgccgtggcccagttccgatttacagatttcctggagtagcgaatatatcaattccacttataatgcccccggcgtgcaaagcccggttatcgacagcctgatcaaccaaattattgccgcgcagggaaataaagaaaaattactgccgttggggcgagcactggatcgcgtattaacgtggaattattacatgctgccaatgtggtacatggcggaagaccgtctcgcctggtgggataaattctcccagccggccgtgcgccccatctatagcctcggtatcgatacctggtggtatgacgtcaataaagcggccaaactgccgtccgccagcaaacagggagagtaaatgggcgcttacctgattcgccgtctgttgctggtgatcccaacattatgggcgattatcaccatcaactttttcatcgtgcaaattgcgcctggcggtccggtcgaccaggccatcgccgccattgagtttggtaatgccggagtattacccggcgcaggcggtgaaggtgttcgtgccagccatgcgcaaacgggtgtcggcaatatcagcgacagtaattaccgtggcggacgcggattagatccagaagtgatcgctgagatcactcatcgctacggttttgataagccgatccacgaacgttacttcaaaatgctctgggactacatccgctttgattttggcgatagcctgtttcgcagcgccagcgtgctgacgctgattaaagacagtctgccggtttccatcaccctcggattgtggagcacgctgattatctatctggtgagcattccgttaggcattcgcaaagctgtttataatgggagccgctttgacgtctggagtagcgcatttatcatcatcggctacgccattccggcctttttgtttgccatcctgctgattgtcttcttcgcgggcggcagctatttcgacctgttccctctacgcggcctggtttccgctaactttgatagcctgccgtggtatcagaaaatcaccgattatctgtggcatatcacgctgccggtgctggcgacagtgattggtggctttgcggcgctgaccatgctgacaaaaaacagtttccttgatgaagtgcgcaagcaatacgtggtgaccgcgcgtgcgaaaggggtaagtgaaaaaaatattctctggaaacatgtgttccgcaacgccatgctgctggtgattgccggttttccggcgacgtttatcagcatgttttttaccggcagcctgctgattgaggtgatgtttagtctcaatggtctgggcttactgggctacgaagcgaccgtcagccgcgattatcctgtaatgtttggtaccttgtatattttcaccctgattggcctgctgctgaatattgtcagtgatatcagctatacgctggttgatccgcgtattgattttgagggacgttaatgagccgactcagccccgtcaatcaggcccgttgggcgcgttttcgtcataaccgtcgcggctactggagcttatggattttcctcgtcttgtttggtttgagtttgtgttctgaacttatcgccaacgataaaccgttgctggtgcgttatgacggcagttggtatttcccgttattgaaaaactacagcgaaagcgattttggcggcccgctggcaagtcaggctgattatcaggacccgtggctgaaacaacggctggaaaataacggctgggtactgtgggcaccgattcgctttggtgctaccagtatcaactttgctaccaataagcccttcccttctccaccctcccggcaaaactggctgggaacggatgccaacggcggcgatgtgctggcacgcattctctatggcacgcggatcagcgttctgtttggcctgatgctgactctctgttccagcgtgatgggcgtgctggcgggggcgctacaaggctattacggcggtaaagtcgatctctggggacaacgctttattgaagtatggagcgggatgccgacgctgtttttgattattttactttccagcgtcgtacagcctaacttctggtggctgctggcaattactgtcttgtttggctggatgagtctggtcggcgtggtgcgggcggagtttttacgtactcgtaatttcgactacattcgtgcggcacaggcgcttggcgtcagcgatcgcagtatcatcctgcgtcatatgttgcctaatgccatggtcgcgaccctcacctttttaccgtttattttatgtagtagcataaccaccctgaccagcctcgatttcctcggcttcggtctaccgctcggtagtccgagtctcggtgaactgctgttacaagggaaaaataaccttcaggccccgtggcttgggatcaccgccttcttgagcgtggcgatattattgtctttgctgatctttattggtgaagccgtccgcgacgcatttgatcctaataaggcggtgtaacatgacgcaaactctgttagcgattgaaaatttgagcgtgggttttcgccatcagcaaaccgtacgtacagtagtcaatgatgttagtctacagattgaggctggcgaaacgctggcgctggtgggtgagagtggtagtggcaaaagcgttaccgcgctgagtattttacgcctgctcccttccccgccggttgaatatctctccggcgatattcgttttcatggcgaaagcctgcttcacgccagcgatcaaacgttgcgcggtgtacgcggtaataagatcgccatgatttttcaggaaccgatggtgagcttaaatccattgcataccctggaaaaacagctttatgaagtgcttagtctccaccgcgggatgcgtcgggaagcggctcgtggcgaaattcttaactgccttgatcgcgttggtatccgccaggcggcaaaacggctgacagattatccgcatcagctctccggcggcgaacggcagcgggtgatgattgcgatggcgctgttaacgcgaccggaattattaattgccgatgaaccgaccaccgcactggacgtctctgtccaggcgcagattttacagctgttgcgcgaactgcaaggcgagctgaatatgggcatgctgtttattactcataacctcagcattgtcagaaaactggcccaccgcgtggcggtaatgcaaaacggtcgctgtgtcgagcaaaattacgccgctacgctatttgcaagtcccactcatccttacacacaaaagctactcaacagtgaaccgagtggcgatccagtgccgttgccagaacctgccagtacgttgctggatgttgaacagcttcaggttgccttccccattcgcaaagggattttgaagcgcattgtggatcataatgtggtggtgaaaaacatcagttttacgctacgagcgggtgaaacactgggtttagtgggcgagtccggttccgggaaaagtacgacgggactggcgctgctgcgactgattaattctcagggcagcatcatctttgacggtcagccactgcaaaatttaaatcgccgccagctgttacctattcgtcatcgcattcaggtggtatttcaggatccaaactccagcctcaacccacgactcaacgttttgcagattattgaggaaggcttacgggttcaccagccgacgctttctgccgcacaacgcgaacaacaagtgatagccgtgatgcatgaagtgggattagatcctgaaacacgccaccgttatccggcggagttctctggtggtcagcgacaacgtattgcgattgccagggcattaattcttaagcccagcctgatcatacttgatgaaccgacaagtagtctcgacaaaacggtacaggcgcaaatattgacgctattgaaaagtttgcaacaaaagcatcaactggcctatttgtttatcagccacgatttgcacgttgtccgcgcgttatgtcatcaggttatcatactgcgacaaggggaagtagtggaacaaggaccgtgcgcgcgcgtgtttgccacaccgcagcaggagtatacgcgtcagctactggcgttgagctgacgcttaaaaaggattgtagttactaaagggttcggcaattgccacaccaaaatttttcaatcggcatgttgcagcaaactcgtcctggcgatttacaaacaggcacggctcaccttcacactccagcacgctacatggaacttcgatgtcgcttaacgcctggcttagtttatacatcacgctccatgcattatcaccatccgggctaagcaatttaagcgccaccaggctgttgtcaccgcacggtccattttgcggaatcggttcaaccttgctacctgcgaaaccagcagaccagcgatagttctgcggcagtcgatggacgatactgagttgtaaactagtcacttattttccccggaagcacattcacttcacaatttgtttacatcaattttaacacatcatcaacaatccgtctttatacagatcgtaaagattgatgcctcgcctgcgtggcctctatggctctgatttaagtaatatctgcgggcgtggtcacgtttgcggggctatatgtacccgtttctgcgatctaactcaacctttttaactacaatgatgtgactttttacataaattgattttacataaaataaacatatatcgggggaatgatagatttgtggttgacatgcatcaacaaaggaagccttttagcttcctcgttgtgcaatagatcaccgttttttcggccgactggcgtacagacagaagagaatggagctggttgcgcagaatgcaatactccaaatcatcggccatgcagagttaaaggtcgcaagagaaagcaatgcgccaacaattgcccctatgccaaaacggaaggttcctgccaggctagatgccgttcccgccatatggggaaactcatcaagaatgaccgccatcgcattggaactcaccatgctcacgcagcccacaaacgccgcaacgccaaccaccaggctccaaaatcccagccccagcagcgcactgatgaccatccacgctgccataataaattgtatccacaacccgctgcggaacatatttaacgcgccaatgcggcggacgaagcggctgttaaagatggtcatcacgaacagaaaaacaatgtttagcgcaaagtaataaccaaagttttccggcgcgacgtggttaatttcaatataaacaaacggtccggcgcttaagaaactgaacatcccggcaaagctgaaaccactggcaagcatgtagctcaggacacgtttatggcggaacagcgccgcaaagttaccaatagtggtacgaatgtgaaatggctgacgacgctccggtggtaaggtttctttaatcaggaagaaaatcattgcgctagccagaatcgccgctaatgccaggatccagaagatgtaatgccagctcagccacaccagcacccagccgccaactatcggtgccatcagcggtgcaatggttgtcaccagcatgacaaagctcatcatccggctgaactcttctttcgggtaaatatcgcgcatcagggcgttaatgaccacgctggccgcagccgcagccagcccgtggaagaaacgcatcacaatcagctgatcgatggtgtttgccaacgcacacgccaccgcggcggcggcaaacaccagcgtaccgccgagcaccaccggcttacgcccgaagctgtctgccatcggcccgtagattaactgccccaacgcaaagcccagaatataagtactgagggtcatctgcgtactgcccgccggtacgccaaactgcgcactaattaccggtagcgcgggcagatacatatcaatgctcagcggcatcaacatggccagcaggccaaggataaaaacaatagcaaagctgctatgctgtcgggtggtcacaacgggctcctgaaagtcattgaaaagttagacgacgctggcaatttcttcttcagttaacggacgatattcaccgggggctaaatcagcatccagcgtaataccgccaatacgttcacgatgcagctcaaccacgtggttacccacggcggcgaacatgcgtttcacctgatgataacgcccttcgctgatggtcagacgaacctgcgttggggtaatcacttccagcaccgcaggcttagtgagatctttttcgttatgcagctgcacgcctttagcaaattgctctgccgtatcgtcagctacaggactttccagtgtcaccagataggtcttctcgcaatgatggcgcggagaagtaatgcggtggctccactgaccatcatcagtcatcagcaccagaccggtggtatcaatatccaaccgccccgccgcatgcagtttccacgctaccggttcatcaagaaaatagagcaccgttgggtgatcagggtcgtccgtggagcaaacatagccctgaggcttattgagcatgaagtaacgtggaccgtgttgctgcgccagcgggttgccatcgtaagcgacatcatgttcaggaagcagtttgaacgctgcattacggacgatttcgccatcgacggtgacacgattgccgcggatttcacgcccggcaatagcacggctaacgccgagttgctgtgcgataaatttatcaagtcgcatgtgtgtgattttgcctgtaaaaacggaggtcgggcattgacccgaaaatctgaactgttgtctgcccagtatagcggtctaataacatccctcaagggaaaaagatccatggcatactattagcagaataatctacctacgcgagaccatgatttttacacttcgcccatatcagcaagaagccgtggatgccacgctcaaccattttcgtcgtcataaaacccctgccgttatcgtgctgcccaccggcgcaggtaaaagcctggtgatagcggaactggcacggctggctcgtggtcgcgtgctggtgctggcacacgttaaagaactggtggcgcaaaaccatgcaaagtatcaggcgctggggctggaagccgatatttttgccgccgggctaaagcgcaaagagagccacggtaaagtggtatttggcagcgtgcagtctgtcgcccgtaatcttgatgcctttcagggtgaatttagcctgttgattgtcgatgaatgtcaccgtattggtgacgatgaagagagccagtatcagcaaatcctcactcacctgacaaaagtgaatccccacttacgcctgctggggctgactgccacgccttttcgattgggcaaaggctggatctaccagtttcattatcacggcatggtacgcggcgatgagaaagcccttttccgtgactgcatttatgagctgccgctgcgttatatgattaaacacggctatctgacgccgccagaacgactggatatgccagtagtgcaatacgatttcagccgcttgcaggcacagagtaacgggctgttcagcgaagccgatctcaaccgtgagctgaaaaaacaacaacgtattaccccgcacatcatcagccagattatggagtttgctgcaacgcgcaaaggggtgatgatttttgccgcgacggttgaacacgcaaaagagattgtgggattactgcctgccgaagatgcagcactgattactggcgacacccccggcgctgagcgcgatgtgttaattgaaaattttaaagcccagcgttttcgctatctggtcaacgtcgcggtactgaccaccggatttgacgccccgcacgtcgatcttatcgccattctgcgccctaccgaaagtgtgagtctttaccaacaaattgtcgggcgcggtctgcgtctcgctccgggcaagactgattgcttaattcttgattatgcgggtaatcctcacgatctctacgcgccggaagttggtacaccaaaaggcaaaagtgacaacgttccggtacaggttttctgccctgcctgcggttttgccaacaccttttgggggaaaacgaccgccgacgggacattgattgaacactttggtcgtcgctgtcagggatggtttgaagatgacgacggtcatcgcgaacaatgtgacttccgtttccgttttaaaaattgcccgcaatgtaacgcggaaaacgatattgccgcccgccgctgccgcgaatgtgacaccgtactggttgatccggacgatatgttaaaagcggcgctacgactgaaagacgcgctggtattacgctgtagcggcatgtctttgcaacatgggcacgacgagaaaggcgaatggttgaaaatcacctattacgatgaagacggcgcggatgtgagtgagcgtttccgtctgcaaacacctgcccagcgtaccgccttcgagcagctttttatccgcccgcatacgcgcacaccgggcatcccgctgcgctggatcaccgccgccgatatcctcgcccagcaagccttattgcgacacccggattttgtcgtcgcccgcatgaaaggccagtactggcaggtgcgtgaaaaagtgttcgattacgaaggtcgttttcgtctggcgcacgaattacgcggttaatggtagttttgattgatgtataaggcgattgagtatagaatctcgcccgcttttgcatacgcaaagcagatcacttacctgttgctgggtcgcctgtagcaggattaatttaagagagaaagaaatgtttactatcaacgcagaagtacgtaaagagcagggtaagggtgcgagccgccgcctgcgtgccgctaacaagttcccggcaatcatctacggtggcaaagaagcgccgctggctatcgagctggatcacgacaaagtcatgaacatgcaagctaaagctgaattctacagcgaagttctgaccatcgttgttgacggtaaagaaatcaaagttaaagctcaggacgtacagcgtcacccgtacaaaccgaagctgcagcacatcgacttcgttcgcgcttaattgctgaataagttgtaaaaaaccccgctccggcggggttttttgtatctgcagattatgcctgattacggtattgctattttttgcaggccagataaggcgttcacgccgcatctggcattcagaacacaaaaccgattaattgccgccagacgtccggcgctgcaattggtcgcgcaaattcggcggcgtgcctttaatggtcaaggtatcggttgctggatcccagaagatgcgttcacctaacagcatcgcatcaaagttaatagtcaagccaccgccgctaccggcaaacttcgtcaactgacgcagtgtgctacggtctgccgggaagctctcttccagttcgtagcctttttcagccgcaaactccgtgaagctcacttcgcttacgcctgccagctctttgctcaggcttttcagttcgatctcttcgcctgcctgcagctgctcattacagtagctataaacctgctggcgcacgttctgtcgctctgctttatccagttgtgcttcggcagtgaaatcatcaaccgcttgcaacagcccacggttttgcgctttcgcgtttaacccttcgctggccccgaggaaatccataaagaaatccgccactttgcgccctactcgccctttcaggaaagtgagatagcgggtggactctggattggtttcccattcggttaaatcgatacgcgcaacaatatccgcatgattgatatcaagataatgggttgggttgatgtcgagattttcgttaacgcgcatactgctcaggttgctcagaactgccaccagcaaatactccaccgccagatagcgatagtggcaaaacagcacgaatccaccgtcagcaaaaggatatttcgctaattcgtcacgcaggcggccggttgccgcgcggctaaatgccaggaagtcctcttcgccctgacgctgtaagcgcagcgtctgcgccagttcactctcttcgctaaacaagccgtaagctttatttttggcgctatagacccgatgcagttctgccaccatctcaacgacggtttctgtcggttccagcaaactatcgcgcaacaccagctcaaggttctgctcatcacgcttgataagctggtgcagagcaatctggttgatatccagactcatgataaactctcctttaagaccgggcggtattcaaccaccgccggttaagcgacgcaataaaagatggcggtcattttacagaaggcagcgtaacgagaatgatttaacgcataaaaaagcagaaaaaaaaccgttgctacggtaatatgttgccctttcatcaactaactgatttcgatttatgccacaaatttcccgctacagtgatgaacaggttgaacaattgctcgcagagctgctcaacgtactggaaaaacataaggctccgaccgacctttccctgatggtgttaggcaacatggtcactaaccttatcaacaccagcattgccccggcccaacgccaggcaattgccaactcttttgcccgcgccttacagtcctctatcaacgaagacaaagcgcactaagggaaacagataacaggttatggtaactcatcgtcagcgctaccgtgaaaaagtctcccagatggtcagttgggggcactggtttgcactgttcaatattctgcttagcctcgtcattggcagccgttacctgtttatcgccgactggccgacaacgcttgctggtcgcatttattcctacgtaagcattatcggccatttcagcttcctggtgttcgccacctacttgctgatcctcttcccgctgacctttatcgtcggctcccagaggctgatgaggtttttgtccgtcattctggcaacggcgggaatgacgctattactgatcgatagcgaagtctttactcgtttccatctccatcttaatcccatcgtctggcaactggttatcaacccagacgaaaatgagatggcgcgcgactggcagctgatgttcatcagcgtgccggttattttattgcttgaactggtgtttgcgacgtggagctggcaaaagctgcgcagcctgacgcgtcgtcgacgcttcgcgcgcccgctggccgcattcttatttatcgcctttatcgccagccatgtggtgtatatctgggccgatgccaacttctatcgcccgatcaccatgcagcgcgctaacctgccgcttagctacccgatgacggcgcgacgttttcttgagaagcatggtctgcttgatgcgcaggagtatcaacgccgtcttattgagcaaggtaatccagacgccgtttccgttcagtatccgttaagcgaactgcgctatcgcgatatgggcaccgggcagaatgtgctgttgattactgtcgatggcctgaactacagtcgcttcgagaagcagatgcctgcgctggcaggttttgctgagcaaaatattagcttcacgcgccatatgagctccggcaacactacagacaacggcatctttggcctgttctatggcatcagcccgagctatatggacggcattctgagcacccgtacgcctgcggcattaattactgcgcttaatcagcaaggctatcagctggggttattcagtagtgatggctttaccagcccgctgtatcgccaggcattgttgagtgatttcagcatgccgagcgtacgcacccaatccgacgagcagaccgccacgcagtggatcaactggctgggacgctacgcacaagaagataaccgctggttcagctgggtttctttcaatggtactaacattgacgacagcaatcagcaggcatttgcacggaaatatagccgggcggcaggcaatgtcgatgaccagatcaaccgcgtgctcaatgcactgcgtgattctggcaaactggacaatacggtggtgattatcactgccggtcggggtattccactgagcgaagaggaagaaacctttgactggtcccacggtcatctgcaggtgccattagtgattcactggccaggcacgccggcgcagcgtattaatgctctgactgatcataccgatctgatgacgacgctgatgcaacgcctgctacatgtcagcacacctgccagcgaatatagccaaggtcaggatttgttcaaccctcaacgccgtcattactgggttaccgcagcggataacgatacgctggcaattaccaccccgaaaaagacgctggtactgaacaataacggtaaataccgcacttacaacttacgtggtgaaagagtgaaagatgaaaaaccacagttaagtttgttattgcaagtgctgacagacgagaagcgttttatcgctaactgattaattataaatcagttagcgaaatatcttacttgcaatcggtgtggaaaacggtagtattagcagccacgagtcggcacgtagcgcagcctggtagcgcaccgtcatggggtgtcgggggtcggaggttcaaatcctctcgtgccgaccaaaaatcccaagaaaaaaccaacccttacggttggtttttttatatctgcaattaattcgataaacagaccgtgacacatcacagcctgtttattttctgttatcagaacgtcctgagctttcatcctatgaaattaattgctgttaaaagcattgggtacagaaaatacccatagctccatacccggagtcagtttttaaaaactgtttaaagaaatgcacaagtattgtgattgattttttagttgtttttcttgatgagaagctgatgcaaaattccgtctttataatgaaaatgatgccaaagcgaacgacaaggttgtagttttcactacatgtccatacataaaatggggtaacattcacgcgcctggtagcgttaccaacgctacgctcaaacataatgattctaataaaacctcaggagactactatgcctgaagcaacaccttttcaggtgatgattgtggatgatcatccacttatgcgacgcggtgttcgtcagttactggagcttgatcctggctctgaagtggtcgccgaagcgggcgacggcgcgagcgctatcgatctggcgaatagactggatatcgacgtgatcttgctggatctcaatatgaaaggtatgagtggcctggatactctcaatgccttgcgcagggatggcgttaccgcgcaaattattatcctgaccgtatccgatgcctccagcgatgtctttgcgctgatagacgcaggcgcagacggttatctgttgaaagacagcgacccggaagtattgctggaagcgattcgtgccggagcgaaaggcagcaaagtctttagcgaacgcgtcaatcagtacttacgtgaacgtgaaatgtttggcgcggaagaagatcccttcagcgtgctgacggagcgcgagctggatgttctgcacgagctggcacaggggctgagtaataaacagattgccagcgtgttgaatatttccgagcagacagtaaaagtacatattcgcaatctgctgcgtaaactcaatgtccgcagtcgcgtggcggccaccattctgttcctgcaacaacgcggggcacaataaaaatagcccgatggatttatcatcgggctgagatttatgacaaacgcaaaactgcctgatgcgctacgcttatcaggcctacgtggatcgatcaatttattgaatttacacaattttgtaggccggataaggcgttcacgccgcatccggcataaactaagcgcactttgtcaacagtctagcccgatggcatcaccatcgggcctctttttatttactctcctgcgggctcaaatgttgcatcgcctgcgcgatactacgttcaatcaccgcacggcgagtatcgttggcaggtaagagtttcaacatcatctcccacgcggcaacggcttcgccaaatcgctgctgctcaaaggcattaaacgcatacatgcttagcacacggatattgctatggtccgttctcaccagctgacgtagcagttcaccgccgaggcggttgtcgttgggatcagaactacgagtcaacgcttcagcgtatcccagtgcagcatcactgtttttcggatcgaggcgatacgcagtggcgtatgcatcggtggcgatactggcgttacccagcgccatgccaacgcggcccaacataatccagccttctatatctcccggatttttttgcagttgagtacgcatccccagcgcaagacggctcatctcttcttcgttgagcggatcggctttcggatccagcgccctgtccagcaacgccggagcctgtgccgtggcctgctgccagattttcacctgctgataattgccagtctggtagtagctgacgccagccacaattaacgccaccacaatacccggcagataaacaacatatccggcacgcttaccttccggcacgctttgttcaggaaacgcttccggcaccacgcgtacccgacgccggctgcgggcgtatatgacccaaccgccaatgccaatagccactactggcagcacccacagcagcacggtcagcggcgttaacggcggatcgtaagtgacgaagttgccgtaacgcgccaccatataatcgacaatctcttttttacttttaccttcctgcatcagttcatacactttctgacgcaggtcggtggcaatcatgctgttggaatcggcaatgctgttgttctggcatttcgggcagcgcagttcttcagtgagctgacggaactgttgttcctgtgcttcatctttaaactgcaacacatcgatggtcgccagcgcactgccggagatcatcagcatcagcacgcccaataaaaacctcattgtgcggcctccttactgtatttctcccacagcggcttgatctcttcttcccagacgcgaggattcagatcgcccgcatggcgatagcgaatgatgccgttgccgtcaataagaaacgtttctggcgcgccatagacaccgagatccagccctaacatgccatcgccatcaaacaggcttagcgcgtaaggattgcccagctctttcagccagctgattgccttctggcgatcgtctttatagttcatgccgaccacgcggatgccctgcgcagaaagctgattcagatattgatgttccgcacggcaggtcggacaccaggtcgcccagacgttaagcagtactggtttgccctgagtcagcacatccgcctgataaaactgccccggattgtccagactttcgagacgaaacttcggcacaggcttgccaatgagcgcgctttccagattggtcggatcatccccttcggcattacgcgccagctgccacagcagcgccgcggcaatcgccaggaagataatcaacggaattaacaatactttgcgcttcatacggcctccggcgcagttttttgcggactcacgcgcttacgatagcgaggatcaaacagacacagcagtccgcccaacgccatcatcagcccgcccgcccaaatccagcgaacaaatggtttgtagtaaagacgcacggcccacgcgccgttttccagctcttcaccgagggccgcgtacaggtcacgcgtgatgccgccgtcaattgccgcttcggtcatcatgctcccggcagtgttgtaataacgtttttccgcatacagcaccgtttccggcttgccatcgcgcgttacgccgatagtcgccacaccgccacgccagttcgggccagtcacctctttgacatcacggaaggtgaagcgatattcatgaatatcgacgctatcgccggacttcatgcgcacatcacgctcaacgctatagttctggctaaaggcaatgccaacaattgtcactgccagcccaaggtgagccgccaccatcccccaataactgaaggtggttttcgtgccgcgactaatacgtagcgcagcttccgcaattgccagcaccgcaatccagcaggccattgccaggccgagcaccgtcatcgccacaactttgctttcgaacagccacggcaacagcaggctcagcaccagcgtagagatgaaggcgataatcaataaattgcggatcttacgcgggcgatcccgcccccagcgcaccagaggaccgacaccaagcagtagcgcaaacggcaccatcagccaggtaaacatggtgttgaagaacggttcgccaatgctaatactgcccagtcccagttgcttatgcaccaacggcagcagcgtccccagcaacaccaccagcatcgcagcgaccagcaaaacattgttcgctaacagcaaagattcccggctccacagcgcattgtttacgcgactgcgaactttgtgtccacgcgcggcaaacagcagcaggctaccgccaatcaccagcaccataaaggcgaggataaacataccgcgcgccggatcagacgcaaacgcgtgtacgcttaccagcacgccggaacgcacgaggaaagtccccaacagacacaagctgaaggcactgattgccagcagtaatgtccacgctttgaagctggcgcgttgttcagtgaccgccagactgtgcatcagcgcagtccccaccagccacggcataaagctggcgttttctaccggatcccagaaccaccagccaccccagccgagttcgtaataggcccatgcggaaccgagcacgatgccgagcgtcaggaagatccacgctgccagcgtccacggacgagtaaaacgcgcataagtgctgtccagacgcccgctcagcaaagaagcaatggcaaaagcaaacgccacgctgaaacccacgtaccccatataaagcagaggcggatggaagatcagccccggatcctgcaatagcgggttaagatcgcgaccttcaatcgggaagttcggcaacgtgcgagagaacgggttagaggtaaagagaatgaacagcaaaaagccgacactgaccatccccattatcgccagtacacgggccacaatatccagcggaatacgctgactaaaaatcgccaccgcaaaggtccagccgctcatcagcagcacccacagcagtaggctgccttcatgcgcgccccaggtagccgccacgcgataccacaccggaagctgggtattggagttgctggcaacataggtgacggtgaagtcgttgaccacgaaagcattgaccagcaccagaaatgcgccagccacagacataaacagcagccaggcaaacaagcgggaagacgccatcatgcgcgcatctccgcgcgccacgccccatagcggatacacggacagcagcagcgcaattcccagcgccaggcacagcagtccgttaccaatttctggcatcatgatgctgggtccttataaacttacgtcaacttgctgggtccttataaacactcgccgggcgacggtggttagcttccatcgctttctcaacttctggcggcgtatagttttcatcgtgtttcgccagcacttctttcgcgaggatatgattgcctttttccagttcgccctgcaccacaacgccctgcccttcacggaacagatccggcaaaatgccttcgtaagagacatccacactgccttcagcatcgtaaatggtgaaggtcactttcaggctattgggatcgcgctgcacactacccggcatcaccatcccgccaacgcgcagacgctgaccgacttccggcatttgctgagtttcacgcttgccgtagagaatttcccccggcgtataaaagagatcgatattgctgcgcagcgcatatagcaccagaccgatagtcagcgccagccctgccaacacggcacaggcaatccacaagcggtttttacggcgaatattcatgcagcctcctgctgttgcgcagcacgtaaacgcgcctcacgcgcccgctgttgcgccacgccacgcagaattgcgcgatgttgcatcacgctgtgcacgaccaaaaccaccagcggaataacggtcatcaccaccgccagccagacaaaaaaggcgtaaccgcccattgcgaaaaattcattccaggaagcaaatgcaggggtcatttacggcctcttttcagtatcagttcactcacccacggacggcgtttttccatcagcaaaatcaaattacgcatccgcatcagcgtcagcgtggcagacaggagcaggaagccaaaaatgctccagcgcagcgggctacgcatcgccggatcgatactttgctgcatccgcgtacttccctgatgcagggtgttccaccactccacggagtaatgaataatcggcagattcaccacgccaatcagcaccaggatacctgccgcacggcccgccagacggcggtcgtcgaaggcgtgccacagggcaatcacacccacatacaaaaacagcagcaccagttcagaagtcagacgtgcatcccatacccaccaggtgccccacatcggttttccccatgcagagccggtaaccagggcaataaaggtaaacacggcaccaatgggggccatcgccgccaccgccaggttggccattttcatctgccagacaaggccaataaacgctgccactgccatacttgcataaatgcccatgctccagatcgccgcaggcacatgcaggtagataatgcggtagctatttccctgctgataatcagccggagcaaagccgaatccccagatccagccgacggtaagcacgaccacactggcaattgccagccacggtataaaccagccacagatttgatacagccgtggtgggatcgccagttgatgcagtgttttccacatagtttcgataccagactcgaacaaaaatcagtaatccagcgttattgaatgctgattcgtaacgctgccgccgtcgcaaaaggacttaatgtcgcggtgcctgccagcaacgcgcctaaaattgccagatacccgtcaacgggcaaatgcatagaagccgcgtccatcgcggcggtggcaaagatgagtaatgggatagtcagcggtaacaccagtatgctgagcagcacaccaccgcgcttaagtcccactgtcagcgccacgcccggtgcaccgagaaagccaagcgtaggcgttcccagcagcagcgtcagcgccatcacttgccagccataaacatccattcccagtagcattgctaccagtgggctaaggatgagtaacggcagaccggttaccatccagtgcgccatcaccttcgccagcacaacggcgggcaagggtaacggcaacaacatcaattgttcaagactgccgtcctgcaaatcgtcacggaacagtcgttccagcgccagcaaggaactaagcagcgcagcaacccagataatgcccggtgcaatacgcgccagcagttgcggctccggaccgatactgagcggaaaaagggtaattacaatcaggaagaaccacagcgggttggcgatttcggcgctatggcgaaacgctacacgcagctcaagacggaaaatgcgccagaacatcatgcggccctcgtttgcgtcagactaatgcggcgaattttactttcagcaacgttgagcggctggtgggtagtcagaatcacaatccccccctgctccgtatgctgcgccatacgctgggtcagacgatcgacaccgttaacgtcaatcgcggtaaaaggctcgtcgaggatccataacgtggcacgggtcagccacagacgcgctaaagcgacgcggcgttgttgcccggcgctgagctgatttacaggaatatcttcgaatccggcaagcccggcctgcgccagggcttccagacattgtgcggtatcgccatcgcgatgataaaagtgcagattttctaacgccgtcagccgggttttgatccccggctgatggcctatccataacaggttttgatggtagctgtcgcgtacctgatgcaagggctgcccttgccagagaacctcgcctgcgtcagggcgagacaaccccgtcagcaaacggagaagcgttgtcttccccgcgccgttgctaccggtgatttgtacccactctcctgcgttcagcgtaaaactcaagccactaaataaggttcgttcatcccgctcacaaagtaactctctggcttcaagcatacccacgcaataaccctgttaaaaacctggctcgacttcacgcatatcgggcagcttgtgcgctatccctttatggcaatcaatacaggtttgcccatctttcaccgcctggtcatgcatcttcgcggcaacgcttttctgggcggttgtatccatatactcgaagttgtgacagttacggcactcctggctgttattgtccttcatgcgccgccactcattctgtgccatcgtcagacgatgagcttcaaatttctgcggcgtgtcaataacgccaaaaattttaccatacagctctttacttgctttgagcttgcgtatcatcttcggcacaaactcgtgcggaacgtgacaatccggacaggtcgcacggacgccgctacggttgttgtagtgcacggaatccatgtattcctgatacaccgtgttgcgcatttcgtggcagctaatgcagaactcttcggtattggctttttccatcccggtgttaaagccaccccagaagacgatgccgccaacaaaaccgatcaacagcagcgtccccagcgccagacggctgggggtacgccaccatttccacaggcgcttaatcagaccaggcttacggtcagaatttcccataataacctcttatttcccgtaacctttacttggggtaaaggtattccccacgattggcgcggtatcggcctgcggtacgtgacattgcagacagaaataacgacgcggagccacttccgcgcccactttgccgtcgctgtccataaagtgagtaggactgatacgcggcgcgccagtggtgcgatagctttcgacaccgtggcactgcaagcagcgattggtattggtcgttacctgataaccttcaacgctatgcgggatcattggcggctgattcacatagttcagcggcatccgatcctgctcttttggcatccgaatggccccttcctgtgtcccggatacttccgggctctggctaaaatcgacgccattagccgcccaaaccgcgccgcttaccaccagggccagcatcgccgtccattgacacagcgctttcttcaggtcatggcttttcatgatttcgctcccgaactccattatgtcaacttttcgctccgctactccatcgtgtagttattgtaaatacatcctcagaacagacatccacgcagcgaccgcacgtcatgcaatcgcggctggtgacctgcaccgggctttgttcatccagcaccggggcacgtagcacatgcggttccgggcaaacatgaaaacaatccatacagcggttacatttctgccgatcggtggccgcaacggtaatcacacctttgctacccagcacgccatacagcgcgccaaccggacaaatgtgcccgcaccagccgtgttcaacgaccagtagatcaaataaaaacagcgcgagaataagcagcgcgccgctgccgaagcccattaccaggctacgccccatcagagaaacggggttgatccattcccaaatgagcgtgccagttaaggcacttcccaccagaatgaccaccaacagcacgtagcgaatgtggcgagggatcgtcgcagactgattgaggtcaaagcgcctgcgtaaccagttcgctaagtcggtaatcgggttcagcgggcagacccagctgcaaaataatcgctttcccgccagggcgtagagcacggtgataatcaccgcaccggtcaacgccaccgtggcaggcagatgaccactggcaagactttgcagcgtcatcagcggatcggtcagcggaacggtgtcgaataacaggctactgctgtagttgccgtgcaagatccacacaccaaaccatggaccgctcaaaaacatccccagcacgaagaactgacaaaggcgacgtaacaccagccaacggtgactgcgccaccagccttttttctccagcgcctcgcgcccggcgtcacgtttacgatttgccattgttcccctccagccagccgttacttagcttttgccattgttcccctccagccagccgaagcggtaatggtgacctaactcccctttcgccagactcagcggtaacaccttgattgccggttgttccagcacgcatactttttcgcacttaccgcaaccggtacaggcgtcgctgtgaaccgtcggcagaaagcgggcgtgcttaccggtacgcgtgttgcgctccagctccagggtgatggcctcatcaattttcgggcattcgcgataacaaacatcgcagcgcagcccctgaaagttgagacagttttcctggtccaccagtaccgccagccccatccgcgcgtcgtcgatgctttcaatctcacgatccagcgcaccgcttgggcacactttggcgcacggaatgtcctcacacatttcgcaaggaatatcccgtgcgacaaaatatggcgtgcccgcgctcagaccagaggccagcgtcgccagttttaaggtgtcgtaagggcaagcctgaacacactgaccgcaacgcacacaggcactggcaaaggcgttctcgtttatggctccgggcgggcgcaaccgcacgccagatgcgcgtgcggtttgctgttgtaaccccagcgccacacccacggcagccagcccgcctgctgtgcgaacgacatcgcgcagaaagcggcggcgaccattttgaggtttcgcactccgggacataatggcttacaccttctccagtttgaccgcgcacttcttgaagtccgtctctttgctgagcggatcggtcgcatccagcgtcagtttgttaaccaactgtgcggcgtcgaagaacggcatgtacaccaggccctgtggcggacggttacgaccgcgcgtttcaacaatgctgatcacttcgccacggcgagaaaccactttcactttgtcgccacggcgcagatcgcgcgctttcgcatccagcgggtgaataaacaggaccgcttccgggaaggcgcggtgcagttctggtacacggcgagtcatactgccggtgtgccagtgctccagaacgcgtccggtagagagccacaggtcgtactcttcatccggtgcttccgccgccggttcgaatggcagtgcgaagatcaccgctttgccatccggtttaccgtagaacttatagccttcgcccgctttcacgtacgggtcgttaccttcgctgtaacgccactgcgtttctttaccgttcaccaccggccagcgcagaccgcgcgctttgtggtagtcatcgaacggtgccagatcgtgaccgtgaccgcgaccaaaccatgcgtactcttcgaacagccctttttgcagatagaagcccagctcgcgggattcatcgttcagctgatcttccgccagttcggataccgggaatttgctcacttccggtgtggcatacagcacttcgtacagcgttttgccacgcagttccggtttcttcgccagcagatcttccggccatacttcttcagttttgaagcggcgggagaactggactaactgccagagatcgcttttcgcttcgcccggtgcctgtacctgttgacgccagaactgagtacggcgttcggcgttaccgtaagcgccctctttctctacccacattgcggtcggcaggatcaagtcggcggccagcgcactgactgtcggatacggatcggagacgatgatgaagttgcgcggatcgcgccagcccggcatacgctcttcattgatgttcggcccggcctgcatgttgttggtacacatggtccagtaaacattcagtttgccgtctttcagcgcacggtcttgtgccaccgcgtgcagaccgattttcgccggaatggtgccgctcgggatattccacttcttctcgcagatatcacggtgtttctcgttggtcaccaccatgtccgcaggcagacggtgagcaaaggtgcccacttcacgcgcagtaccacacgcagaaggttgcccggtcagggagaacggaccgcaacccggctgggaaattttgccggtcagcaggtgcaggttgtagaccaggttgttagcccacacgccacgagtatgctggttgaagcccatcgtccagtaggagatgactttcttgttcggatcggcatacagctgcgccagttgttctaactggtctttcggcacgccggtcatttcggcagttttttccagcgtatactcggcaacgaaggctttgtaatcttcaaagctcatcggttcggaggcgtcagaacccggattcttcgctgctttttccagcggatgggtcggacgtaaaccgtagccgatgtccgtcgcccctttgcgcaggttaacgtgcttgctgaagaagtcctgatttatcgcattgttttgaatgatatagttggcgatgtagttcaggatcaccaggtcagattgcggcgtaaagatgatgccgttatccgccagctcgaagctacgatgctggtaggtagaaagcaccgccacggtgacgttctggttagagagacgacggttagtgatgcggctccagaggatcgggtgcatttccgccatgtttgcgccccacagcacaaacgcgtcagcctgctcgatgtcgtcatagcagcccatcggctcatccataccaaaggtacgcataaagccaactactgcgctcgccatacagtgacgcgcgttcgggtcgatgttgttgctacggaagcccgctttaaacagcttggacgcggcataaccttcccagatagtccactgaccagaaccgaacataccgatgctttccggccctttttctttcagggcggttttgaatttctcttccatcacatcgaaggcctgatcccaggtgattggggtaaattcgccttctttgtcatatttaccgtttttcatacgcagcagcggctgcgtcaaacggtctttaccgtacatgattttgggcaggaaatagcccttaatgcagttcaggccacggttaaccggtgcgtccgggtcgccctgacaggccaccacacgtccctgctgcgttccgaccagaacgccgcaaccagtaccgcagaaacggcacggcgctttatcccatttgatggcttcctgctgaccaacaacggcgcgggcaacgcccggcacgctgagaccggcagccgccgcagcggccgcaacggcgttagctttcataaagctacgacgactgagtttcatggtgtttcctcaccttgctcttcctgctggtgataaaccaggctcaccgccagcacgccctctacgttgcgtacactctcaatggtttggatcagcgtttcgctgtcttctgcttccaccaccacaatcaactgaccgctcggcgcgtcgctgacagcaacttcacagccgggaaaggcgttcagttgggtgctgatgtcactaattcgttcgcttttggcctgcacgaccaggctgcaaacttgccagttagtgtgcatggagatactccgcagttatggcacttaccggacagctggctgcacatgctccacatccgttgcaaagttggctattaagttgcggctggtagatcccggagagcgtcgggcgaaagataattgccattggctcacagctatcctgacagcggcggcattcaacactctgatacgccaggcacgcgtccccgatggtgaactgcaaatcccaggccctggtgtggcgcggagaaaataggctttcggggcaagcctgcgcgcaggcgtaacagaagctgcactcgttatttttgaaattaacgctcggatagccgcccgcgccgcgttgcagaatgttgttttcacaagcattaatacaggcgtcgcagcgggtgcaatgggtcagaaaatgagattcatcaccggaccagggcggacggataccgttactggctttgcgccagcgaccagtgagtatgccccgacgggatgcatcaatcttcacattgaccttccatcattaacgcgctctgaaaattgagagcgaccaaataaaccgcataattaataagccatttttatagccgctaagatattaaaggatgtgtcaaagatgcataccccgatcggggtaaaacctgtagcaggatcaaaagagtggcgggaagcgtggcaaaaacgggcttttgctcacatttcaaatggttataaatatatttatatagcgattgattcaccagagatatttctgctggtttgctctctcattagaatttaacactaaaagagcaggtaaaattgtctgaatgttctttaagttattcataaagcaaattaataaatctgatgaatatgttaaccttcagcgacatcatcggtgaaaacctataaatgaagaaggaaagcaaaaaaatgaagaccattctacctgcagtattgtttgccgctttcgctaccacttccgcctgggcggcagaaagcgtccagccactggaaaaaatcgcgccttatccacaagctgaaaaagggatgaagcgtcaggtgattcagttaaccccgcaagaagatgaatctaccctgaaagtagaactgttaatcggtcagacgctggaagtcgattgcaatttgcatcgtctcggcgggaagctggaaaacaaaacgctggaaggctggggctatgattattatgtctttgataaagtcagttccccggttagtacgatgatggcctgcccggatggcaagaaagagaagaaatttgtcaccgcgtatctgggcgatgctggaatgctgcgttacaacagcaagctgccgatcgtggtgtatacgccagacaatgtagatgtgaagtaccgcgtctggaaggcggaagagaaaattgacaacgcggtagttcgctaaactgccgtgaagtgcggcaccccgtaggtcagacaaggcggtcacgccgcatccgacatccaacgcccgagccggttgcctgatgcgacgctggcgcgtcttatcaggcctacaccgctgtgaagtgcggcaccccgtaggtcagacaaggcggtcacgccgcatccgacatccaacgcccgagccggttgcctgatgcgacgctggcgcgtcttatcaggcctacaccgctgtgaagtgctccaccccgtaggtcggataaggcggttacgccgcatccgacatctaacgcccaagccggttgcctgatgcgacgctggcgcgtcttatcaggcctacaccgctgtgaagtgctccaccccgtaggttggataaggcggttacgccgcatccgacatccaacgtccgagccggttgcctgatgcgacgctggcgcgtcttatcaggcctacaccgctgtgaagtgctccaccccgtaggtcggataaggcggttacgccgcatccgacatctaacgcccaagccggttgcctgatgcgacgctggcgcgtcttatcaggcctacaccgctgtgaagtgctccaccccgtaggttggataaggcggttacgccgcatccaacatctaacgcccgagccggttgcctgatgcgacgctggcgcgtcttatcagcatacgccacatccggcataccatgccggatgtggcgtatcattacaacgcaatatccgccacttctttttgaacgggttgcggtttcaactgcggtttcggcgtactatctgctgcctgcggcttgtcgtagttcaaccccagcacttcgctggtgtactgcaactcgcgttctgttgccgctacatcaccgttcagcttgcgtccataagacggaacgatcgctttcaacgtagcctgccattgcgggctggaaacacgatcgccaaatactttttccagcagattcaacataatcggcgcggcggtactcgcccctgggcttgcccccaggagcgcggcaatggttccttgctggtcactgacgacttcagtacccagacgcagtacgccacctttctcggcatcacgcttgataatctgcacgcgctgccccgcttgccacaaacgccagtcctcttttttcgcctgcggatagtactctttcaacgcttcaaaacgatcctcttcactcaacatcacctgactcaccagatatttcaccagatcgaaattatccagcccgacgtgcatcatcggcatcacgttagaggtggtggtggaactcattagatcccacaaactaccgtttttgaggaatttggtactgaaggtggcaaatggcccaaacagcactacgcgtttaccgtccagaacgcgggtatcgatatgcggaacgctcatcggtggtgcgccaacggatgctttaccgtaaaccttcgccagatggtgattaaccacgtccgggttttcgctaacaaggaactgtccgcccaccgggaaaccggcgtagtctttcgcttccggaatcccgctttcctgtaacagcttcagcgccgcaccgcccgcgccgataaagacaaatttggcacgaatgttctgtgcagtgccatttttcagatcggcaacggtaacggtccaggtgttatcgtcattacgctttagggcgcggacttcgctgctgagttgcaggctgaagttagatttcttctgcaaggaagcaattaactggcgggtgatctcgccgtagttcacatcggtaccaatttccgtacgcgtggctgccactttctgttgcggatcgcgcccttccatcactaacggtgcccactctttgatctgcgcgtgatcttcagagtaacgcataccgcgaaacaggctgctttgttgcaacgcggcgtaacgggcgcgcaggaaattgacgttatcctcgccccagacaaagctcatatgcggaacggtattgataaaactacgcggagtacgcagcacgccgcgctcaacctggtgcgcccagaactggcgggaaatctgaaatgcttcgttaatggcgactgctttttcaatactgatgctgccatcggcgttttgcggggtgtagttcagttccatcagtgcagaatgcccggttccggcgttattccagccgttgctactctcctgcgcgacaccctccaggcgctccaccatggtcatgctccattcaggctccagctcgcgtaaataggtccccaacgtggcgctcataatgccgccgccaatcaacagtacatcagtttcctgctcctcggacgctttcgcttttgccgccatgctaacggcattaagccccacggccatgctgaagagcatggcagtcacttttttcatcttgttaatgccttacttttagtcgctttattgcaggtgagatttgcgcggcatcaacggtaacacttaagtaacaacatttaaataatgtttataaattatattctaattttagaaacattataatttcgttgattaattatagggttattagaaatgaagggatttttagcatattgacctgacggcagcagtccgccaggtcagcgtcgtaatattatgccgtccgggcaacggcatcacggctagcggcatcgcgctcttcgcccgtcagctcgctaagttgcccattgcgcatttccagcaggcggtcggcgtggataaagtaatgatcatcatgactgatagcgaaaatagttttacccatctcctgcatcagcggcagcaacacctgataaaactcacgacggaagtgtggatcctgatccgccgcccattcatccagcaggataatatcgcgttcttctgccagcgccagcaacagcgccacgcgttttttctgccctttacttaacttcaggttaacaatacgcccgttgcttaactcaagcttatgagccattttcagctgcgccagccacttctcaaccagttgcgggttagcgggtttaccctccggccccagcagttgatcaaacagccagacatcggtaaacactgcgctaaacagtttgcgataatcttccggttgttcgccgctgacaggtttgccatccagcaagatttcgccgctttgtggctgatacaagcccgtcaacaacatcgccagcgtgctttttccgctaccgttgccgccaatcagaaacagcagctcgccacgtttgatggtgagattaatcggaccaacggaaaacgcgttatcctgataagcaaacgtcacgttacgcagctccagcgtttgccagttgggaaacgcctgcgggcgcggaaactctgctttgaaaggcgcgagcgcgaatttgttcagcttgttaaacgccacctgcgccgtcagcagcgtcggcaatgcgccaaccgcgctaagcagcggcgtacgcaggaataaaagcgtcaagctataggtcgcggcaacgttggtatcagcccaaccgaggctgttcgccatccagaacaccaggccgattgcgcccagcatcatgatgttactccagttcacggcactaagatggaaggtgtctgcgcgaataatatggtggcgatactcttgcgcatcaggaatgtagaggttgttaaacacatactcggcgcgttcccggttcagagtcagctctttgcgcccttcaagtacagtttgaaaatccgtgtacagcttgtcttcggtttcacgcagggtcgccatatgtttgtacacccgcgccaccagcacaaaaccgccccagatggtgatcgccatccagatagccgttaccagcaacattttgccgctcagcatccacagatacgccgcactaccgatagtgagaatgatcccctgcaccagttccggcagacgcacaaaagcaatggtgatattgcgcacatcgctggttaaccccgccagcaagctggcgctaccgagttgttcaatgcgctcgacgtgagtatccagaatccgcttgataaattcactacgcagtcggtaaacgaagtgatgccccaaagtggtgagcgccagttggcttccgagagtgactgccatcaacagcagcaataatcccagaaactccggcaacaccagcagactggtatccgccgtttcgataaggcgctgattgataaaagcaattaagccaatgcctaatgccgcactggcgaggcttagcgccatcacactgataaatggccagcgatactgccgccagacaagtacaagaagttccatgcagaaaacccggacaatgaattacagcccgcagtttaaacatcttcgcgcgcacagcaataataattcttatttttattcttttttacctgcctgacggaatgtcaggttgtagcggcagtcgatggtgagtggatgaaaccccgctttcaacggttgaataccgtgataaaacagccggctttcaccgccccataccaccacatcgccatgttccaacaacaaacgtttgagcggatcatttcgtttcaggccgccaaattgaaaaatcgcgggtaagcccagagaaacagaaacaattggcgcgcgcagatccggttcgtctttatcctgatgcaggctcagtttcgcgccaggagcgtagcggttgataagacaagcatctggctggaaatctggatagcccgccgccgtagccgcacgttgacataaattatgaaaactctgtggcatggcgggccacggtttatttgtttgcggatcaatggggctatagagataaccttgccgatgggtcgtccagcccagatgcccacagttggtcatcgccacgctcatggtatatcccccgggggtgaccatctggcgaaacgggctctggctggcaacgtcattaatatcgcggatcagttgctccgcagcgttaaaagcaaaacgccgtaaaattaccgcaccagccgccagtggctcttgccacggttcagcatcggcaaacagatccaacattacctctcctcattttcagcttcgcggcgcagcagttgcgctttacggctcacgccccagcggtaaccggaaagtgtgccatcaccacggaccacccgatgacagggtattatgatagccagcttgttggcggcacaggcgctggcaacggcccgtaccgctttcggtttgccgatggcgttagccagttgctgataactgacggtttcaccgcaaggtatcgtgcgcagtgcctgccagacttgttgctgaaaagcagtgccgcgaatgtccagcggtaacgtcagcggcgtatcgcgttgattgaggctggcgatcacttcacgcacatgttgctgaaacatcagatcggcaggcgcgttgtcggcagcgggaaacatctgctgcaactcgctgattagtgtcgcgtcatcatcgcccagcaatatcgcgcaaatcccccgctcgctttctgccaccaggcaacgacccagctcacaatcagccagcgcgtaacgcaccgccagattttcgccaccgtgacggaattgtttagccgtcatgcccagcgtttcgtcagctttgcgatagtaactgctgctgtcggggaatccggcgttaagaatagacgtcgtcacgctctcccctttcgccaggctttcgcgcaaacggcgagcgcgccaggcctgttgccaggctttaggcgtcattccggtagtcgctttaaacaaccgatgtagatgaaatggactcatcgccacctggtcggctaaggcttccagcgttacaggcgtttcctgttccagcagtcgacacgcgtgggtgattttatccaaccgatgttgctgggcattggctttttctggctgacaacgtttgcaggggcgaaagccagcggcgagtgcctcgctggcatttgcgtagaaggagacgttttcccgcaaagcatgtctggcgcggcaagacggacggcaaaagatgcctgtggtacgcacggcgaaaacgaattcgccgtcggcattcgggtcgcgggctaagacagattgccagcgttgatcgtcagttaagcatgtggcttttttcataatcagctccctggttaaggatagcctttaggctgcccggtcaccatcacgcaaaaaccaacaatcttgcgctttaatttttttcgctgacaaggaagcttttaaactgtggactcatccaggttttaaagctatcgccttctttggtgatcatataaaccgccagcccttcccggcgaacaacctctttagctttctccggcccgagtaccatcaagccagtatcccaggcatcggcttccagcgccgtcggagcaatcaccgtcacggataccagattgtgttcgatgggacgcccggtttgcggatcgataacatgggaaagacgtttgccgtccagttcgtaatagttacggtagctgccagaggtgctaatcccatgaccgttgatatccaccacagcctgaaccgcgttttctttatcggttggtttttgaatcgctacccgccacggcaggccttcaccgttcataccacggctgttcagcgcgccgcccacgctcaccagatagcgggaaatcccttcctgctccatcaagcgtgccaaatgatcggccgcatagccttcgccgacggtggagagatcgacatataaatccggcaggtctttttgcagatattgctgatggctctgattgatgaccgtcaggtgctgtaagccggttttggctttcatcgcatcgatctgttcctggctcggaatttgaaccggctgttgttccgggccaaagccccacagattcaccagcggcccgacggttatatccatcgcgccatcggtcttcgcgccaatgcgcaggctggtggtgacgatatcggccatcgcttcacttaccggccacgggcttaaactttggctgtcgttaaagcgcatcagcgcggaatcttttttataggtgctaagcagctgatcgtcggcgtccagttgggtctgaatcttttctttaagttcggcgctgcgtttggcgtcaatgcccgggatgctggcacgccagaaggtacccatagttttgccttcaagaacggtaacttcagtagcgtgggttttggcgggttgtggtttttgatcgcaaccaacaaagaagagcgcggcagccagcagtgccacgcgggtaaagcttatttccatacgtgattatcctcatgcgaacggtcgcaagagtacaccaaaaaactgagtttgtacgctgaaaacaatgaaaaaagggcccgcaggccctttgttcgatatcaatcgagattagaactggtaaaccagacccagagctacgatgttatcagtgttgatgccagcgtcacgagtgaactggttgtcgtccagcaggttgattttgtagtcaacgtaggtggacatgtttttgttgaagtagtaggtagcaccaacatcaacatatttcaggatatcttcgtcgtcgtagccacgacccaggtttttacctttagactgcaggtaagccagggacggacgcagaccgaagtcgaactggtactgagcaacagcttcgaagttctgtgctttgttcgcccaacccagggaacctacgcgagttgcgttgtaggtctgggtgtactgagcagccaggtagatgttgttagcgtcgtatttcagaccaccagtgtaggtttcagcacggtcgccgttaccgatgtaagcagcggtgttctgagcatcagtacgtttggagctggagatcgcaccaccgataccgaaaccttcgtaatcataagtgatagaaccgccgacgccgtcgccgttttgacgcagtgcgtcacgaccgttgttagttacgccactagtaaagccttcaccagatgggttgccgtttttaccctggtactgaacagcaaagttcaggccgtcaaccagaccgaagaagtcagtgttacggtaggtcgcgaagccgttaccacgctgctgcatgaagttgtcagaaccgtaggtgtcaccaccgaattctggcagtacgtcggtccaggaagttacgtcataaacaacgccgtagttacgaccgtagtcgaaagaacccacatcctggaatttcagacctgcgaatgccacacgggtccaggagttgttttcgttttcagcgctgttgccctggatctgatattcccactggccgtaaccggtcagctggtcagtaacctgagtttcacctttgaagccaagacgcatgtaggtctggtcgccatctacatctttgttgtcagagaaatagtgcaggccgtctactttaccgtacagatctaatttgttgccgtctttgttgtaaacttcagcagcgtttgctgcgcctgctaccagcagagctgggaccaggagggacagtactttaactttcatgttattaaccctctgttatatgcctttatttgcttttttatgccactgcatactgattaaccctcattaatcagtcggcaagtccattctccccaaaaatgcagaataatccaacacgaatatgatactaaaacttttaagatgtttcatttatcgctatagatgtttcaaaatgtaaatgcaagggaactttttaagattattgcggaatggcgaaataagcacctaacatcaagcaataataattcaaggttaaaatcaataacttattcttaagtatttgacagcactgaatgtcaaaacaaaaccttcactcgcaactagaataactcccgctatcatcattaactttatttattaccgtcattcatttctgaatgtctgtttacccctatttcaaccggatgcctcgcattcggttttttttacccttctttacacacttttcattattctgtgctaccacagaaaaactataacgcttgttaactatttcacaaataattaacatccgcataatttccagcaatctttgtttatttgcaattatttttgttgggctttttgtaggttatttgtacagcaaaatggcgcttgtacatctatttcccccaatgcaggatgataaatatcacgggagaatagagaatcatcaatcaggtaagagtctggaatttcacactgtaccctttatactgccctatcacttcgcgaagttttaacaggtcataaacacgaatgcgtcagaaagagacaacggccacgacccgctttagtctcctaccggggagcattacccgcttctttttactgttgatcattgtgttactggtgacgatgggtgtaatggtacaaagcgccgttaacgcctggctgaaagataaaagttaccagattgtcgacattacccatgctatccaaaagcgcgtcgataactggcgttacgtgacctggcagatctacgacaacattgccgcgacgacctccccctcctccggcgaaggtttacaagagacgcgcctgaaacaggatgtctactatctggagaaaccacgccgcaaaacggaagcgttaatctttggctctcacgacaacagtacgcttgagatgactcagcggatgtccacttatctggatacattgtggggcgcagaaaatgtaccgtggagcatgtattacctgaatggtcaggataacagtctggtgctgatcagtaccctaccccttaaagatctcacctccggatttaaagaaagcaccgtcagcgacattgttgatagtcgtcgtgcagagatgttgcaacaggccaacgccctcgatgaacgcgaaagcttttctaacatgcgccgcctggcctggcagaacggtcattactttacattgcgtactacctttaaccagccaggacatctggcaacggtcgtggcttttgatctgccgattaatgatttgatcccaccgggtatgccgctggacagtttccgccttgagccagacgcgacggcaacgggaaacaatgataatgagaaagaagggacggatagcgtcagtatccactttaacagtacgaagattgaaatctccagcgcactcaactctaccgatatgcgcctggtctggcaggttccttatggcaccttattgctggatacgttgcaaaacattctgctgccactgctgctgaacatcggtttgctggcgctggcgttatttggctataccacattccgccatttctccagccgcagtacagaaaacgtccccagcacggcggtcaataacgaattgcgcattttacgggcaatcaatgaagagatagtcagtctgctgccgctcggcctgctggttcacgatcaggaaagcaaccgcactgtcataagtaacaaaattgccgatcatttgctgccgcatttgaatctgcaaaacatcaccaccatggcggaacagcatcaggggattattcaggcgacgatcaataacgagctgtatgagatccgcatgttccgcagccaggtcgcgccgcgcacacaaattttcattattcgcgatcaggatcgcgaagtgctggtaaacaagaaactcaagcaggcgcagcgtctgtatgagaaaaaccagcaggggcggatgatctttatgaaaaacattggcgatgcgctgaaagaacccgcacagtccctggcggagagcgcggctaaactcaacgccccggaaagcaaacaactggcgaatcaggcagatgtgctggtgcggctggttgatgaaatacagttagcgaacatgcttgcggatgatagctggaaaagtgagacggtgctgttctccgtgcaggatttaattgatgaagttgtgcctagtgtgttgcctgccatcaagcgtaaaggtctgcaactgctgattaacaatcatctgaaagcacacgatatgcgccgcggcgatcgcgatgccttacgacgtattttgctgctactgatgcaatatgccgtgaccagtacgcaattgggaaaaatcacccttgaggttgatcaggatgagtcctccgaagaccgcctgacgttccgcattctggacacgggagaaggcgtaagtattcatgaaatggataatttgcacttcccgtttatcaaccagacccaaaacgatcgctatggcaaggcggacccgctggcattctggctgagcgatcaactggcacgtaaactgggcggtcatttaaacatcaaaacgcgggatgggcttggtacacgctactctgtgcatatcaaaatgctcgcagctgacccggaagttgaagaggaagaagagcgtttactggatgatgtctgcgtaatggtggatgttactagcgcagaaattcggaatattgtcactcgccagttagaaaattggggtgcaacctgtatcacacccgatgaaagattaattagtcaagattatgatatctttttaacggataatccgtctaatcttactgcctctggcttgcttttaagcgatgatgagtctggcgtacgggaaattgggcctggtcaattgtgcgtcaacttcaatatgagcaacgctatgcaggaagcggtcttacaattaattgaagtgcaactggcgcaggaagaggtgacagaaagccctctgggcggagatgaaaatgcgcaactccatgccagcggctattatgcgctctttgtagacacagtaccggatgatgttaagaggctgtatactgaagcagcaaccagtgactttgctgcgttagcccaaacggctcatcgtcttaaaggcgtatttgccatgctaaatctggtacccggcaagcagttatgtgaaacgctggaacatctgattcgtgagaaggatgttccaggaatagaaaaatacatcagcgacattgacagttatgtcaagagcttgctgtaacaaggtagcctattacatgaacaatatgaacgtaattattgccgatgaccatccgatagtcttgttcggtattcgcaaaagtcttgagcaaattgagtgggtgaatgttgtcggcgaatttgaagactctacagcactgatcaacaacctgccgaaactggatgcgcatgtgttgattaccgatctctccatgcctggcgataagtacggcgatggcattaccttaatcaagtacatcaagcgccatttcccaagcctgagcatcattgttctgactatgaacaacaacccggcgattcttagtgcggtattggatctggatatcgaagggatcgtgctgaaacaaggtgcaccgaccgatctgccgaaagctctcgccgcgctgcagaaagggaagaaatttaccccggaaagcgtttctcgcctgttggaaaaaatcagtgctggtggttacggtgacaagcgtctcagcccaaaagagagtgaagttctgcgcctgtttgcggaaggcttcctggtgaccgagatcgctaaaaagctgaaccgcagtattaaaaccatcagtagccagaagaaatctgcgatgatgaagctgggtgtcgagaacgatatcgccctgctgaattatctctctagtgtgaccttaagtccggcagataaagactaatcacctgtaggccagataagacgcgttagtgtcttatctggcatttgcaccgattgccggatgcggcgtaaacgccttatccggcctacgattcccattatttcaacaaattacattaaagtaggccagataagacgcgtcagcgtcgcatctggcatttgcactgaatgccggatgcggcgtaaacgccttatccgtcttagctatcccggcttttcctgaccctctcggcatataacgtcagcgtctgttttatcacatccagcgttaccggcttgctcaggcagctgtccataccggactccagacaccgctgcttctcttcagccaacgcattagcagttactccgattaccggcaacgtcagtcccaactgacgaatgcgttgcgtcaagcggtaaccatccatatttggcatgttgacgtcgctaagcacgatatcaatatgattcttgctaagtacattaagcgcatcgacgccatcattcgcggttttacattgatagcccaagcttcccaactgatctgccagcaaacgccggttaatcggatgatcatccacgaccagaatcatcatatcgtcattatcgctgaccgctttgtccgtactcggcagagcgttagcaggatcgtcgctctccatctcgatcaaataaatacgcgccaacaatgccggtagctcatgcggagcagccacactgtgtacccactcccctggcgctttctccagcggaataccaatatggcgacgacagaaggtcactaccgctctgccctgccattttttactcactacctcgtcagtgatcaacacatcttcgggagtcggttcctgcccttcgtatgttgtaacgacgatgccgctgcgctgcaaactggtttccaggaactgacagaggctcgcattgcggaccgccagccagcagcgtttaccactcaacccttccacgccttttttctgcgggtactgagcgccgtacaacggaatacgcacggtaaactggctgcccattcccggttcactatctacgctgatatcgccgtccatcatgctgatcagtttttcacaaatcgccagacccagaccggtcccctggaaattacgctgtacgcccgttccgacctggaagaagggatcaaacaagcgcaccacttctttcgccggtatccccacgccggtatcgcgaacacggatagagagataatcgccatccgcgcgaacatgcaaaactatacagccggtatcggtgaattttatggcgttactcaacaggttggagatgacctgctgtaaacgcatcgggtcgccatttaaggccactggcacatccggttcaataaagcagtacaagcctaactgcttgcgtaccaccagcggtaaatagttggcggtgatgtggttcatcacttcacgcggactaaactcacgcggttcgatcttcaactgttcgctttcaatcttgctgaaatcgagaatatcgctgataattttcaacaacaggctggaagagttgttcattgccgtcaccagccgatcgacgcctttcggtaactctttggtttgcaacagatccaggttaccgataatgccatacagcggcgttcgcagctcatgactgacggtggcaaggaacatgcttttactctggctcgcctgttccgctgcttgtgccatctcctgcaagctctcttccatcttcacgcggctagaaacatccaccagcacacaaatggccacgttttcattacgatagcggctatggacgaagctgatttgcagattggtattgttgctggtcaggacatcaacaaaattgacctgctgcccacagataatttgcgtcagtcgttggcggtcctcatgcgtaagcatattgagataggtatgcgccagttcgttacttaaaatattgacgccatcagcggtacgcaaaatgcagatacccactggcgcggaggcgacaatcttgcgattgaactgctcatgttcttccagtcgcagggcgtcgctttccgccggaatgaaaatacgtcgctcgtacatccgtgcgagagtaaacaatgcagctccggcaagcacattcagcaaaattgcgttaaggatcaacatgcgaatgcgttccagcaccttatcaaccggcacgctatacacgatgcttaggctactgggtggcagatttttcttcagcaccagctcccggaacccttccgtatagccaaaccaggagcgttcctgcatccagcgaggatcgcccttaattttactttctggtccggtaaggctaatcagggtatgaccattttcatcaagaatggtaacccccatcggcaacgtacccggtaagaaaaagttctccatccggatggtctgctcgacacccaaaagcgcctgcaaccggttcgccagataaactggcgtcaacgcgtaaaaatacccgacgccagggcgcggaccttcgctgatccagtagaggttactgccgctatcatcttgtggtgcatttcgatatttattgatgcgttcatgcaaagctttcaacgcggtatcgcgttccactggcatatcacgcagaccgaaattggccatgcagaggttatcgctgccgattaaaaatacccggtttagatcgtaagccgcagaaaaattatcgcgccagtagcgcataaaccacgccaaactctccagagaacctcgccaggtgttactcattgcggaacaatcggagtcggcaaacagcggttcaaacgcaggcacatccgcctgcgtttctcgtccacgcggggaaagcacaccgttttctgcgcttaagcgattttcggcgatgtacttcagctctttcatcacatcagaggtgcgttgaataaagcgctgagcctgatcggaactcagattaaattcctgacgaatttcgctttctcgctgatgtaacgcattaacgatgtaaaaaacggaactaaaagcaatcaacagccagagcactaacgccaatgctctgaacatgtagcggctggctttcagggttgtacgaaaagaagcaaggtatttcaaaggggcgaagctccgcctcaggtgaccgatggagtgtggttaaggtagcggtaaaagcgtgttaccgcaatgttctctcttctctggaatatgatacaccgccgagaaatcatcaccttaacctctgataatcgtcatataccggacaagactagtggatttcagcatgcattatatgaagtggatttatccacgccgcttacgcaatcaaatgatcctgatggcaatcctgatggtcattgtcccaacgcttactattggttatatcgtagaaacggaaggacgtagtgcagtcttatctgaaaaagagaaaaaactttctgccgtggtcaacctgcttaatcaggcactaggcgatcgctatgatctctacatcgacttaccacgtgaggagcgtatccgcgcattaaatgcagaacttgcccccattaccgaaaatatcactcacgccttccctggcatcggtgctggttattacaacaaaatgctggatgcgataatcacctacgcgcctagtgcgctatatcagaataatgtcggcgttaccattgccgcagatcaccctggtcgcgaagtgatgcgtacaaatacccctttagtttatagtggcaggcaggtgcgcggcgatattttgaatagtatgctccccattgagcgtaatggtgaaatcctcggctatatctgggccaatgaattaaccgaagatattcgccgccaggcctggaaaatggatgtgaggattatcattgtgctcaccgctggtttgctgataagcctgctgttgattgtccttttctcccgtcgcctgagcgccaatattgatatcatcaccgatggcctcagcactctggcacaaaatattcccactcgattaccacaattgcccggtgaaatggggcaaatcagtcagagtgttaataacctcgcccaggcactgcgtgaaacgcggacacttaacgatctgattattgaaaacgctgccgatggcgtcattgccattgaccgccagggtgatgtaaccaccatgaacccagcagcagaagttatcactggctatcaacgccatgaactggtagggcagccttactccatgttgttcgacaatactcagttctacagtccagtactggatacgctggaacatggcaccgaacatgtggcgctggagatcagttttccaggtcgtgaccgcaccattgaactcagtgtcactaccagtcgtattcataacacgcacggtgaaatgataggtgctttggtgattttctctgatttaactgcccgcaaagaaacccagcgccgcatggcgcaagcagaacgcctcgccacactgggtgagctgatggctggcgtcgcgcatgaagtacgtaatccgttaacggctattcgtggttatgtacagatcttgcgccaacaaaccagtgacccaatacatcaggaatatctgtccgtagtactcaaagaaatcgatagtattaacaaagttattcagcaattgctcgaatttagtcgtccacgccacagtcaatggcaacaagtcagcctcaatgcattggttgaagaaactctggtactggtacaaaccgccggcgtacaagcgcgggtcgacttcataagcgaactggataatgaattaagcccgattaacgccgatcgtgaactgctcaaacaggtactactgaatatcctgatcaatgccgtccaggctatcagcgcacgagggaaaattcgcattcaaacctggcaatacagcgacagtcaacaggccattagcatagaggacaacggctgtggcattgatctcagcctgcaaaaaaagatcttcgatccctttttcaccaccaaagccagtggaaccgggcttggtctggcgttaagtcaacgcatcattaatgcccatcagggtgatattcgcgtcgccagtttgccgggctacggcgcaaccttcacgcttattttaccgatcaacccgcagggaaatcagactgtatgactgctattaatcgcatccttattgtggatgatgaagataatgttcgccgtatgctgagcaccgcttttgcactacaaggattcgaaacacattgtgcgaacaacggacgcacagcattacacctgtttgccgatattcaccctgatgtggtgttgatggatatccgcatgccagagatggacggcatcaaggcactaaaggagatgcgcagccatgagacccggacacccgttattctgatgacggcctatgcggaagtggaaaccgccgtcgaagcgctacgctgcggagccttcgactatgttattaaaccgtttgatctcgatgagttgaatttaatcgttcagcgcgctttacaactccagagtatgaaaaaagagatccgtcatctgcaccaggcactgagcaccagctggcaatgggggcacattctcaccaacagcccggcgatgatggacatctgcaaagacaccgccaaaattgccctttctcaggccagcgtcttgattagcggtgaaagcggcaccgggaaagagttgattgccagagcgattcactacaatagccggcgggcaaaggggccgttcattaaagtcaactgcgcggcgctgccggaaagcttgctcgaaagtgaactgtttggtcatgaaaaaggtgcatttactggtgcacaaaccttgcgtcagggattatttgaacgagccaacgaaggtactctgctcctcgacgaaattggcgaaatgccgctggtactacaagccaaattactacgcattctacaggaacgggaatttgaacggattggcggccatcagaccataaaagttgatatccgcatcattgctgccaccaaccgcgacttgcaggcaatggtaaaagaaggcaccttccgtgaagatctcttttatcgccttaacgttattcatttaatactgccgcctctgcgcgatcgccgggaagatatttccctgttagctaatcactttttgcaaaaattcagtagtgagaatcagcgcgatattatcgacatcgatccgatggcaatgagtctgcttaccgcctggagttggccgggaaatattcgagagctttccaacgttattgaacgcgccgtcgtgatgaatagtggcccgatcattttttctgaggatcttccgccacagattcgtcagccagtctgtaatgctggcgaggtaaaaacagcccctgtcggtgagcgtaatttaaaagaggaaattaaacgcgtcgaaaaacgcatcattatggaagtgctggaacaacaagaaggaaaccgaacccgcactgctttaatgctgggcatcagtcgccgtgcattgatgtataaactccaggaatacggtatcgatccggcggatgtataacaccaaaacttgctatgcagaaatttgcacagtgcgcaattttctgcatagccgctcattctccttataaatccccatccaatttatcccttcatattcaattagttaaataactaaatccaataatctcattctggcactccccttgctattgcctgactgtacccacaacggtgtatgcaagagggataaaaaatgaaaacaaaattgatgacattacaagacgccaccggcttctttcgtgacggcatgaccatcatggtgggcggatttatggggattggcactccatcccgcctggttgaagcattactggaatctggtgttcgcgacctgacattgatagccaatgataccgcgtttgttgataccggcatcggtccgctcatcgtcaatggtcgagtccgcaaagtgattgctagtcatatcggcaccaacccggaaacaggtcggcgcatgatatctggtgagatggacgtcgttctggtgccgcaaggtacgctaatcgagcaaattcgctgtggtggagctggacttggtggttttctcaccccaacgggtgtcggcaccgtcgtagaggaaggcaaacagacactgacactcgacggtaaaacctggctgctcgaacgcccactgcgcgccgacctggcgctaattcgcgctcatcgttgcgacacacttggcaacctgacctatcaacttagcgcccgcaactttaaccccctgatagcccttgcggctgatatcacgctggtagagccagatgaactggtcgaaaccggcgagctgcaacctgaccatattgtcacccctggtgccgttatcgaccacatcatcgttagtcaggagagcaaataatggatgcgaaacaacgtattgcgcgccgtgtggcgcaagagcttcgtgatggtgacatcgttaacttagggatcggtttacccacaatggtcgccaattatttaccggagggtattcatatcactctgcaaagcgaaaacggcttcctcggtttaggcccggtcacgacagcgcatccagatctggtgaacgctggcgggcaaccgtgcggtgttttacccggtgcagccatgtttgatagcgccatgagttttgcgctaatccgtggcggtcatattgatgcctgcgtgctcggcggtttgcaagtagacgaagaagcaaacctcgcgaactgggtagtgcctgggaaaatggtgcccggtatgggtggcgcgatggatctggtgaccgggagccgcaaagtgatcatcgccatggaacattgcgccaaagatggtagtgcaaaaattttgcgccgctgcaccatgccactcactgcgcaacatgcggtgcatatgctggttactgaactggctgtctttcgttttattgacggcaaaatgtggctcaccgaaattgccgacgggtgtgatttagccaccgtgcgtgccaaaacagaagctcggtttgaagtcgccgccgatctgaatacgcaacggggtgatttatgattggtcgcataagccgttttatgacgcgttttgtcagccggtggcttcccgatccactgatctttgccatgttgctgacattgctaacattcgtgatcgcgctttggttaacaccacaaacgccgatcagcatggtgaaaatgtggggtgacggtttctggaacttgctggcgtttggtatgcagatggcgcttatcatcgttaccggtcatgcccttgccagctctgctccggtgaaaagtttgctgcgtactgccgcctccgccgcaaagacgcccgtacagggcgtcatgctggtcactttcttcggtagtgtcgcttgtgtcatcaactggggatttggtttggttgtcggcgcaatgtttgcccgtgaagtcgcccggcgagtccccggttctgattatccgttgctcattgcctgcgcctacattggttttctcacctggggtggcggcttctctggaagtatgcctctgttggctgcaacaccgggcaacccggttgagcatatcgccgggctgatcccggtgggcgatactctgttcagtggttttaacattttcatcactgtggcgttgattgtggtgatgccatttatcacccgcatgatgatgccaaaaccgtctgacgtggtgagtatcgatccaaaactactcatggaagaggctgattttcaaaagcagctaccgaaagatgccccaccatccgagcgactggaagaaagccgcattctgacgttgatcatcggcgcactcggtatcgcttaccttgcgatgtacttcagcgaacatggcttcaacatcaccatcaataccgtcaacctgatgtttatgattgcgggtctgctgctacataaaacgccaatggcttatatgcgtgctatcagcgcggcagcacgcagtactgccggtattctggtgcaattccccttctacgctgggatccaactgatgatggagcattccggtctgggcggactcattaccgaattcttcatcaatgttgcgaacaaagacaccttcccggtaatgaccttttttagttctgcactgattaacttcgccgttccgtctggcggcggtcactgggttattcagggacctttcgtgatacccgcagcccaggcgctgggcgctgatctcggtaaaagcgtaatggcgatcgcctacggcgagcaatggatgaacatggcacaaccattctgggcgctgccagcactggcaatcgccggactcggtgtccgcgacatcatgggctactgcatcactgccctgctcttctccggtgtcattttcgtcattggtttaacgctgttctgacggcacccctacaaacagaaggaatataaaatgaaaaattgtgtcatcgtcagtgcggtacgtactgctatcggtagttttaacggtagtctcgcttccaccagcgccatcgacctgggggcgacagtaattaaagccgccattgaacgtgcaaaaatcgatagtcaacacgttgatgaagtgattatgggtaacgtgttacaagccgggctggggcaaaatccggcgcgtcaggcactgttaaaaagcgggctggcagaaacggtgtgcggattcacggtcaataaagtatgtggtagcggtcttaaaagtgtggcgcttgccgcccaggccattcaggcaggtcaggcgcagagcattgtggcggggggtatggaaaatatgagtttagccccctacttactcgatgcaaaagcacgctctggttatcgtcttggagacggacaggtttatgacgtaatcctgcgcgatggcctgatgtgcgccacccatggttatcatatggggattaccgccgaaaacgtggctaaagagtacggaattacccgtgaaatgcaggatgaactggcgctacatagtcagcgtaaagcggcagccgcaattgagtccggtgcttttacagccgaaatcgtcccggtaaatgttgtcactcgaaagaaaaccttcgtcttcagtcaagacgaattcccgaaagcgaatagtacggctgaagcgttaggtgcattgcgcccggccttcgataaagcaggaacagtcaccgctgggaacgcgtctggtattaacgacggtgctgccgctctggtgattatggaagaatctgcggcgctggcagcaggccttacccccctggctcgcattaaaagttatgccagcggtggcgtgccccccgcattgatgggtatggggccagtacctgccacgcaaaaagcgttacaactggcggggctgcaactggcggatattgatctcattgaggctaatgaagcatttgctgcacagttccttgccgttgggaaaaacctgggctttgattctgagaaagtgaatgtcaacggcggggccatcgcgctcgggcatcctatcggtgccagtggtgctcgtattctggtcacactattacatgccatgcaggcacgcgataaaacgctggggctggcaacactgtgcattggcggcggtcagggaattgcgatggtgattgaacggttgaattaatcaataaaaacacccgatagcgaaagttatcgggtgttttcttgaacatcgacggcgaaggtaaccccattaatcaccagtcaaaacttttcaccagcgtcagctcgccagcattacgcatcggtacaataaatgtttcctgtttctcattgacgcttccttcatcggtgatcagcgtcagttgggcggtggttaattccgtttcgctgcgcccaccatagtagttgatatacacctgatagcgcccgtgaattggcgcgggcatggcgaaaatctcgggtccgtaccccgtcgtgacatccatatccagtgcaccactgtttttcagcacggtgttaccgtaccaggcgtgttcgccatcgggcgtaacaacgtgaaggtcgaggtcggtattgtccgtatcccagctgagaaccagccgtaaacgtgcacgaatcgttcctgtacccggcgtactgtaaaactgcattttttgtcggctttgcccatccgggctgatgacctgcacgctgttgctgccttcagtgaaaatataagggcgtgcaaaactaccatcggattcaattctctgcggcatactggcaccgttgaccaccagccggccctgctgaactttacccgccgcagcataattctttattttgccgcggatctgcgcactgatattttgatcatctgccatgttgacggagctcgccgggtaattgatgctttgactaaaactggcatcttcgccctctgccggatgccagccactgagcggtgcatcaatctcgacttcctgcacaccttcactgtgagcgacagggctaagcgccaccagtaacaacggaagaaaaatctttcgcatagcattagtccattaataattgtcgggtcagcgtttcgatatagttctcatcaagcccggtgggataaccatcaaaggccaggtgcagatactcatgggttaaatccagccgatcctgaagcgtaaagaagttacgaataaacagccgtttctgctgccgatcggtataggggaaaccactgactaaacggcaaaccgcaaacacgtctggttcgttgtaccccgtctcagcttgtaatatacgccgccactgcggcatttttttcgccagccaggctttcgctttgggtaataactggcaggtactgcgtggcgctccccagcggctaagactgttgtcgggataagcaaacgcgagtatctgatcgtaacgctctccctgccccgcctgggccgtggcttgccgccaggaaagtgtcccttcggtagcgcgactgccatgataatgaaccggatcgcctgcatagatgagatcctgcgtccaggcggtcatcgttcgcgcccccgtggtcgctgggctagcagaaacacgctgcgtggcgctgctgtcggggatggtcaggcaatcgccttcccgattggcgttttgctgtaaaaaagtgcgaatcgccacggtcatggctttcgctgcctcagggggcgtacttttcgcctcgcgatccagaactctggcaacgtactcttcacgatcgagatggctctgcaatttcagtttgcccttttcgctcagtaaggtcgtctcaccgtggctgacaaacgtaatgtggttaccattagtaaacgtcacacgatagcgcccattaagtacgccgggatttactgccgtcgtactcttttccgctgtgattttcttcagcggatagcgggcaaacagctccacctctacacattgcccactggcaacctgcgtcggcactggcaaaacccgattaagcaccgtcgcataacgggttagtaccgttttgctggtgccactgccagtaacccacagcggtgtaccatcggttaaccagccagcaaaaccaccctgacggatttcctgtttatcatcggcaaaccagctccaggttttcacccgtacccgactaccgagcatggatgcgacaccgattttcgcctcgtccagcaccacatccagtaagacttcctgagctttgttttgcgcgggtaacgtcgctaaactatcaagcaggcttttaaccgttacgctggtttctggcttcagcgtagtcagagacgctaaccacgcaggtgcctgacgctgttgccagtattgcccccacacatctgcgccaatatgcaaccgctgcggcgcaaaatagagcccacaggaacgtaccagcgcggtatcgcgcgttatgctctccccagcctgacaacaataaacctcttccggggagtttccgcgacactggtagggctgctccggttgatgggtatcctccagccaggcgtaaacatacagtttccacaaactccctaacggcgtggtgaggctgtcaggtaatgcactgactttggtcacgccactactgctcagctgatacagttgatcgtgctgcgcaccgcgcagcaccagttgtaacggcgtctcctccgcaagtgttggcagagtaaccaacgccaatagccagacgattcagcgccagttcacttatttcacctgcatcccggtccattcactccctgccgcaacactttgctgcgcaggtgcataggaacgcacataacgagcaggaggcagaacgaattgccctttttgcgagaagcgcagcaaatggcggaaagtgaccgttcccgtcagttctttcaccggcaccatataggccagttcgcccatttcatttcgcgctttttccagcaattgcccctgctgtttcgcggcgttgggtttattgaccgaaatgccccatgttgtgcgctcaacgtcggctcccggtggcagcggtacttccacctgaccgtagcgcagaactgcatcctgctcgctggtaagcgtgatttcatcgagatacagcgcatcgctgtcaatctcattgctggtcaccggttgcagaataaagctcatctcttcttcaccagggataagccgatacaactggcgttcaacggtcaccggaatgttactttgttgagccatttttgccggctcacgtcagcggacctgcacattttgcggcgataattcgtcaccaaaagagagaatgtccggcacgccctgaccaacccaacgccagtcttcgccccctccagttaacttatgtttagcccatgcgcccgcaggcgcaggcaaaacaactggaggcattgtcgccatatatttcgccagccagttcatggccagcgcgcgctcaatagtggattgctcagcggtcaaaccacttaaaatagcggccgtctgggtagcgtcgccaccgctattaagcagcacaaccgtgtgcgccagcggctgattgctgtttgccgctttatcccacgcatattgctgaacctgtggcatcaccgtggacttcaactgcgcttttttcagcaacgtcatggttaagacgtttgccaccgcatctgccagtggagactccggtgtatcgaggatcaggctatcattgatatcgcgggtgtcttcctcagagaaatcttcagttttagttccgcgccgggcgatagcttcatccaaccctttcaacaacgttttgcacggcaaattcatctcctgcgcccatgccagcaccagcgcccgatgcaataacggcatgttatctgcctgctccgcgtagctgtcgagcatatgctgccagtattccggttgttgcgttacgccgatcgcctggctggcctgccagtcggcgtaccatgcccatgccgtaaggaaggcgtcaccattgccatcttcaccccaccaggtaaagcgcgctccgggccccgccagttgcatcagccgcagacggttatcctgaatcatctgacgaatgtcgttagcggcggcactttgatgatcggcaagcgaacgccaggcgagactgagcgggatcagacggctaccggtgttgattacgccaccccacggttcatcgactaacgcatcaagattgttgcggaaaatctcctgcggcgtttcactactttgtagccggatattgctcgcctgctcgggcaacatcagcgcgttatcgccaccaccgagcatgacatttttctgctgttcaacgggccagctgttatccacaaaagacagttttgtgctaatgctgtcctgcacttgcccattttgttgcagttctgcacttaacaagccagattgctgaatattctgcgtcagcgaaatataattcgcccctttgtgcagcgtcagcgtctggcgcatctcagcgcctgcaaatttagtcaccagcgccaccggttcgttatcctgctgactgaagataaatagtcctgccgccggtttgtcgcccacgcgatacaccgttggcatactccacttcatgtagagatttttttccgaacgcagataagcacgcccctgcccgaccagcccgtcgccgttcatcccacgcgcggtgatacgccagcgggttaacgaatcaggcatcaggaacgtgaaatacgctttgccttgtttatcggttgtgagtgacggcatccatgccgcggtatccacctcttcacgccgtggacgttcaagcatttttactcgccgctcgctgcggttagttgcgccaggcgcaaccggctcgctggagagcgcctggtcgtagctgataaacgacagactggagctggtacgcacattgttacgccccagcggatagaaaaatttgccgatattcggcgcgatttctggttgcagcgcgtagatcatttcatcgaccacgcctaccgttagctgcgcagaaacaggtttacctttcagcgacgaggttaattcgacattgaccagttcaccaggctggtaatgggttttgtccgttttcacccggatatccagctggggaacggcaactttgatcccggcgttctgaaaactgtactgaccgttacgggtatacagcaccgaaaaagtgatgttaggcgcaaaggaattgctcactggaacccgggcttcatactgggtatcgtttaaacgttgtagcgttagccagtttgccggatgcgaaagcagcgactgctgttccacgcgatcgcgttccagcgtcaataatgcttcatcaattggctccggaaaggtaatcagcatcttcgcggtttcgcctggctggtacagcgttttatccgccacgatatctaccgtaccagtatgcgccgtgctgcccttaccgctgacggcatgacttaacccagcgagaattaagccgtctttatcgcgtaatgtcagattgtagttgccaggtttagcgaaattgacggtaaaggatttgccgcctgacggtagctctccgctatggctcgtgcggtcttcgagacgcaaccattcatacgtaacaggaacctgttttgaagattccagcgcggcataacggaacacaaccgactcgccgctattactgtattgtgcggcagtacttaatgagtaatgcgccagaccgcgttcaatgaggatctctttggtggtggtgacgcgatacgccgcgccgtcactggcggagacggttaacaaatagcggctcggtttatcggcggcggggagatttaacgccacatgaccgctggcgtcggacaccgtttcgctgccttccagcgacacggggaaacgtccggcataacgcaaatcgttaccgaccattgataattgctgagcgcgcaaacttaactgcacgcgggcattttttaccggctcgccatccgggtagagcagttgcagtttgccgctgaccgcttcgccagttttgaactcttttttggcgagagctaaaccaatctcgaaatgtggcttgatgtagtttgccacgcgaaaactgctgctatagacctgattgcggtaagcaagacgtaactcataacctccggctacggcattttctggcaggcggaaacttccctgcccgccattgcgcgcatccagcgtgacattgacggtttgcaacagactgccgttggcgtccagcaccgaaagcttcgccggggcgctgacgatgggggatgaatgcaacggatcgtggaactcgcggccgatcactttaacatcgacacgatcgcctgcgcgatatagcgggcgatcggtaaaaatatacaagcgggtgttgtagatttcgctttcgtagaagaagttctcggagacaaaaacgccgccttcagcatccttacccagaatgtatgaacgttctggcgatatatgttgtaactgcaaggtaccgctgtcatcggtcacaccgcgggtcatcacgccaagaccgtcagtccacaagatctctgagccgggcttcgcttcaccctgttttttacccgcggtccacaccagaagctctttgcctgacactttgctaagcgccacggtatcggaaacaaacaccaccgtcgtcgcccgatacccaccaaccatcgcctcgacgaggtacagtcccggctcttgttggccgagaggaatataaatgttacccggctgcggcgagatgaaattgctggatgcgccttccagttttaccccttgctgcggctcgaacggtttagcctgccatagtggataacggaactgtttcaccaggggatattttttcagcggggaaaactggttgttctgtacataacgggaaggtttaataatggcattgccgagctgtaattcgggtaacgcctgagtcacattctgccgtgactgagaagagaaagtacgctgcatcacgcggcgagatttgccgtaccagttatcccacagccaggttagcgtattgttcagcccgtcgcccagatattgcggttgcaccacaatgcgatgcaggtttttctgctggcgcaaaaatgccatcgggtcaggaatacgatacaggcgaacgtccacgccgccgtactcttccatctgatagcgccgataatcacgccccggcgcttccagtcgcactttcgcctcttcactgctgctaaaactgctgtcagcaagcaaaaagaatgttcccccggcaggcggcgcatagttgctggaaggaagcgaatcatcagcattagcaagccctgttcccacaagagacagggacaagcacgctgttatcgcgccagaaaatttaaacgataaatgccaatgaaattgggattggaatcgttgggtatccatcgggtgtccttccatgtcataagttgttgcagactgactgcgcgcattccgttgtcagttttcgtggcgcttccggtgtggtagatgacgtaacgccccatccagaccattaagtgctgggcatcgccctgatcgaaaaaaatcatatcgccaggcagcgcctggtttatgtcctggccaataaactggctgttgtactgaatcaaattaatcgcggtcacataggggccggttttcccgttcccctgattccagttttgcgccagttgacgctgttcaggtgttagcgtcatctctggcggcaaatactggctagataaaccgttactttttagccatttactgtcgtgaactttcagcgtctcgttcgccgcaaatcgcaccaggcccgcacaatcctgctgataccagcgtggacttggcccctggcggagctgttcttgtgcaatgcgtacaaaccaggcgcgaaacagcccggattgttcgacattcagcatttcgctatgggcaacaacacaacacagccagcaaatcagcgccagcagcccgtgcctcatagcggctgccaggttatgggtagccactgccaggcggcaccgggttccatctgggccagcttcatgacataacgcggttgttgagataaagcgtccagcttcggcattaataaagtttgtgcggcgttataaaaaaccggttcgagattcttcggcagactggtcaacgtttcgttacgcagcagtttcgctattccttgtggattgatatagagcggaacgatgccatcagtgggtattacatccaccattgccgggcgggttttattcagtgtttgcagcgcgttattaaccagcgtgtcatcgagggagaaaagcagcgttttgttttgcatcgccaggctcacacggaaaaaataatcgctcattaattgatcgggttgcgccgcctgcgctttcggatactggccgtatcgggaactcacttcgcgacgccagatttgcgcttcgccctgctgagtctggcttaccggcaaaacaccttctggcgctttgctttcgtgcgcaccaatattttgcgtaaacagtttccctggcaattgcgcctgttcggcagtgccatcaaactgaccgacaaacagcggggtttgcaatttactgtcttcataccagcacagccccgcggcaccgtctaacgccccattcagcttgtcgttttcctggctgatgtggctaagcatctcttcggcaataccgtgactatacggcaccgccacacagaagctggctccggcaggcatactgttccataccggcgtaaaatcgaaactggcatctacgctggcggattcatcatttaacgccacaaaactgtgccagccgtcgttacccatttcgaagcgtacgccagcaaaagaaggcattaaccgctggtagccaaaccccagccacctggcgctgactacgatgcgctggcgtactggcgttttttcggcagtacgctcttccaggccaaagcttgcttgccagcgttttttgccgctcaacaaatcacctgcgatcgccgtggcttcggtatcctgctgatcatctttaaacaacatatccgtgctggaaaacaccagcatcttgtcctgataagtcgcgaacatcagggcgttattgccgttatagcgcaactgataaacaggaacagtttcactatttatcttgatgctactgatttccgttttgcttaactggctgtcgctggtagcggcaaacaacaatggctccagcagtttgcttaaaccactgcgctggatcagcaccatataatgactaagatggccttgtttatcgtgccacagcgctgcctgcgcgggctgatctaagagactgctaaagagcttatctttcagcgtgagatcgtgttcatagacaatacgacgaatgctgccttcaatgcccagacgatcggcatgattctgataatagaaaacgaaatcttcgctcagaacatcgtggagaaacggaatggtgaggagatctttgggaagctggctcagagagtcgctgtcgagaaagaggtccggctcattgagatcgatttgcagattgttgtgcaccaccagcgggctcaacgttttttctggcccactgccagcatattgcaacgcccagacgccagcggaaagcagtgctattgcgccaaaacctacaagaccatagaaccgccagcctttcgccttttttcaccactcattgccacattccttgtgtatagccagccattttttacgggcacagccaaactttaccgtgccctaatacgacaaaagcccagactttgcagcctggacttttcaattcaaacaagggagatagctcccttttggcatgaagaagtaaaattattcttcttctggctcgtcgtcaacgtccacttccggagcgatttcatcgtccccttccgcggcactgccgtcgatggtatccagatcttcctcgtcaaccggttcagcaacacgttgcagacccactacgttttcatcttccgcagtacggatgaggatcacgccctgggtgttacggcccacgatgctgatttcgctaacgcgagtacgtaccagcgtaccggcatcggtgatcatcatgatctggtcgcagtcatctacctgtaccgcgccaacaactaaaccgttacgttcggtaaccttgatggagataacccctttcgtcgcacggctcttggttgggtattccgccactgcggtacgtttaccgtaaccgttttgcgttgcggtgaggattgcgccatcgccacgaggcacgatcagagagacgactttatcgccttcacctaagcgaataccgcgaacaccggtggtgttgcagcccatcgcacggacagaagactctttaaagcgcaccactttaccttcagcggagaacagcattacttcgtcttcgccgctggtcaggtcaacgccgatcagctcatcgccgtcaaccagtttgatcgccactttaccggcggtacgcagacggttgaactcggtgaggacagttttcttcacggtaccgttagcggtcgccatgaagactttcacgccttcttcaaactcggtcactggcaggatcgcagtgatacgttcgtcctgctccagcggcagcaggttgacgatcggacgaccgcgcgcgccacgagtggcttccggcaactgataaactttcatgctatagacgcgaccacggctggagaagcacagaatatggtcgtgagtgttcgccaccagcagtcggtcgataaagtcttcttctttaatacgtgcggcagatttacctttcccgccacgacgctgcgcttcgtattcagaaagcggctgatacttaacgtagccctggtgagagagcgtcacgaccacatcttcctgggtgatcagatcttccaggttgatgtctgcgctgttggcggtgatttcagtacgacgtttgtcaccgaactgttcacgaaccagctccagctcttcacggatcacttccatcagacgatcggcgctaccaagaatacgcaacagttccgcgatctgatccagcagctctttgtattcgtcgagcagtttttcgtgctcaagaccggtcagtttctgcaaacgcagatccagaatcgcctgagcttgctgttcggtcaggtagtacagaccatcacgcacgccgaactctggctccagccattccggacgcgcagcatcgtcgccagcacgttcgagcatcgcggcaacgttgcccagctgccacggattagcaaccagcgcagttttcgcttctgcaggcgtcggcgcatgacggatcagttcgatgatcgggtcgatgttcgccagcgccacggctaatgcttcaaggatatgagcacgatcgcgagctttacgcagttcgaaaatagtacgacgggtcaccacttcacggcggtgacgaacaaacgccgcgatgatgtctttcaggttcatgatcttcggctgaccatggtgcaatgccaccatgttgataccgaaagaaacctgcaactgggtctgggagtagaggttgttgagcacaacttcaccgaccgcatcgcgtttcacttcaatcacgatgcgcataccgtctttgtcagactcgtcacgcagcgcgctgatgccttccacgcgtttttcttttaccagttccgcaatcttctcgatcaggcgcgctttgtttacctgatacggaatttcgtggacgataatggtttcacgaccggttttggcgtcaacttccacttctgcgcgagcgcggatatacaccttgccgcgaccggtacggtaagcttcttcaataccgcgacgaccgttaatgattgccgccgtcgggaagtccggccccgggatgtgttccatcagcccttcaatgctgatgtcttcatcatcaatatacgccagacaaccgttgatgacttccgtcaggttgtgcggcgggatgttggttgccatacctacggcgataccggaagaaccgttcaccagcaggttaggaattttggttggcatgacgtccggaattttttccgtgccgtcatagttatcaacgaaatcgaccgtctctttttcgagatcggccatcagttcatgggcaattttcgccagacggatttccgtataacgcattgccgccgcagagtcgccgtcgatagaaccgaagttaccctgaccgtctaccagcatataacgcaggctgaatggctgcgccatgcggacgatcgtgtcatagaccgcgctgtcaccatggggatggtatttaccgattacgtcaccaacgacacgggcagattttttataggctttgttccagtcattgcctagtacgttcatggcgtaaagtacgcgacggtgtaccggcttcaggccatctcggacatctggcagcgcacggccaacaatgacgctcatcgcataatccagataggagctcttcagctcttcctcaatgttgaccggtgtaatttctctcgcaaggtcgctcatctaaccgctatccctctactgtatcccggattcaaaggtcgcaaattataacacagccgcgcagtttgaggtaaacctatacgctttattcacatccaatgcctgatatactcgtttgtcttgccaattacggagtagaagtgccaatgaatgccgaaaaaagcccggtaaaccataacgtagaccacgaagagatcgctaaatttgaagccgtcgcctcccgctggtgggatctggaaggtgagttcaaaccgctgcaccgcattaacccgctgcgtctgggctatattgccgagcgtgctggcggtttatttggcaaaaaggtgctcgatgtcggttgtggcggcggcattctggccgagagtatggcgcgcgaaggcgcgacggtgaccggtctggatatgggctttgagccattgcaggtggcaaaactgcacgcactggaaagcggcattcaggtggattacgtgcaggaaaccgtggaagagcacgcggcaaaacatgccgggcagtatgatgtggtgacctgcatggagatgctggagcacgtccccgatccgcagagtgtggtcagagcctgtgcgcaactggtgaaaccaggcggcgatgtctttttcagcacacttaaccgcaacggcaagagttggctgatggcggtggttggtgcggaatatattttgcgcatggtgcccaaaggcacgcatgatgtgaagaagtttattaaaccggcagaattgctgggctgggtggatcagaccagtttaaaagagcggcatatcactgggctgcattacaacccgatcactaatacttttaaactcggccccggcgtggatgtgaactatatgctgcacacgcagaataagtgaggttgatgtttggccgcgccaatgcctgatgcgacgcttgccgcgtcttatcaggcctacaaatgctccccgtaggccggataaggcgtttacgccgcatccggcaaccgtgccgactagacagtgattaccatttcaccgtcatgctcaaaaaccctgccgtctgggcaaaatcatcactccctttctgccacgccacgctgccgcgcagggacactcgctgactgatattgcccgtgactcccacttttatttcaccccgttgcttcaccgcatcgtcactgatagtgctgccatcctcttcaatttccgtgctatggggatcgtgataataattcagatctaatgttggtatgacatgaacagcggtacgccattcgctgtgtaaacccagccgcgtctgaatatcatcaccctggctttgactcacgcgcgcacggttagcggcggtaaaatcatcctgctgcacgccctgataaatcacctgcgcctgcggttcaatcaccacaccacgccccggtaaccactgataccccgcctccaggctggcgataatcccgctgctgtggtaatgatctgtgccatcttcttgttcggaaacatcattgctaaaccacgcgtattgcagccagctatccagccaggccccttgcttctgattaccgtgctgaaaccagctacttgtcagcccaacggcataaccgtggttctggttatcggcgcgagttccggtcatattgctgcggctgtcgccctggttatcgctgtagccaccaacaatcccaagcatccactcgccatccgtgccccagcgcccgctaaacagatcgccgctaagttgcaccgtagaagtgtcttcatgttgagccagttgccccgctgctgtgtaatgataatctccgccgataacacgtaaattcagcgtctgaccatcgccacctgcgtgatcgcgtcgctccatcataaacgcctgatttgccgcccgcaggttattaagataaccgccaactttggcattcaacaccggctggtaagcaggcgtaggttccgggtcgggtgttggatcaggatccggcgtgggatcaggatcgggagtcgggtctggatcaggtgggcttggcggcgttacttcttggcttcgcagataccagtcgttgttatcttccaccagcgtgtagtcatacgctcccatattgacgtagccgctgcctgccagactgaactgcgcattgttttgaaactgcgtgggatcagctgcgaaatcaaccactttaatgcctgtgcttgtcggctcaccaatccctgtaatggagttaaccaccacagttgtgttgccagcagtattaccgttcatcaccaattgatcgcttacgctgtcatcgccgtttaattcgctatcgagcagtagcgtaccgccgccggtataatcaccgtttaccgtcagcgtatcgccagcgacgccattttgcaggctaaccgcaccggacgtattggtcagattgccattaaccgtcacgttggaaagataagtcaggctgtcagtttcaaggttggtattaagctcacctgtcaacgtcacaccatcggtggcattcaccagcgtcccatcgccgttaaatagactggcattaagggcgacggaagtatcctgcccggtcaggcgcaaaaccgtaccatcgctgatgtcgatagtgccgctggaaatagcatcaatactctgaatatcctgatccgcgccagtaacgaacgttgccccatcaccaacccacagactgctagcataaggaaggatatcagcaacatcacctttcagggtgccttcttcgacacgtaccgcgctctgcgttgtaccgctggcggtcagctccagtgtaccagcccccgttttagtcaatgtgctaccctcatcctgatgctgcccgctgctgtcagccatcagtgcgccccactgcgtgtctacccccgcatcaactgccacttcaccgtcggcgcgcatttcaatatcacgtccgtggcctgccgcatcactacgcgtgtcaacgtcggaggtaatctccatcacgctttcttgttgcttatcggtaaagataacctggcggttatagtgggtatctccaagctggctgttgtcgctcaccatcagcgtaccggaggcgatttgtgttgtgcccaaataactattattgtttgccagacttacctgcccgtcgctcgcatcgaccaccacgtagacgccatctttcccgtcgccgccgatatgcaaattgtcgccacctgcaagatctaccacatcctgactgccgataaccgttccgctgctgccactgacttcaaggccatcgttgtaacttgtgccgctctgccaggtggagaaatcagagagatcgagcacaccgccgtttaacacgatgctctgcggatcgtcctggagagcggtaagatctgccgcgtcgccttccaggctaagcaccgcaccatcatcaacgactatatcgccggttagcgccatgctctgcgcccctgccagcacgtagctgccgttttgcgcaatggtgagctgaccagcaccttcgatgatgccagcaaaactgccctgattaacagtaacgttgccaccagcatcgatatttaaagtgccattctgaaagcccgtcaatgcgtgcacaaaagtttgttgggtgctgccaacgtttagctcagcctgattctgatactgatcaatactccctatcgtcagaccgtagcagtcttgcggatcgtcctggcaatgcgtatcgccgacattcatcagggagttgctgcggcccagggtaacttcaccgttttcaatctgcatctcaccagtaaagtcattgttatctgcattaagtaccagatcgccggaacctgttttggtgattaacccggtaccagcaatagagtcaacagctccgtcattctctgtattgccaataaccagcgtttttccgtcggcaatatcaaaggtaacttcacttaagccgagatacataaagccacccgccgcagaggaaggaccatctccatagcctgctgcgctattgttctcatcgactaacacgcctccgttctggctgtagctgtcatcaacagaaatatcaataagatagggagccgtcacgctattggtatatatcgccccgccataaccttcggcagtgttatttgtaaaggcagtgttatttactatcgtataaccactaggatgcttgctgtcgctattattatcggtaacatcgattgccccgccatcgccatcactgtaacttgtacttgtatatgcctggttgttatcaaaaataacatcacttaaataaacgtcattattaatggtataaattgcgccacctttgccatcattagcgatgttattgcgaaacatggcgttagtgacacgtaaatcgacggcaccagtatcgttagtaccagaagaatagattgcgccaccatagccgcctgcgacgttaccggaaaaaataacatcagtaagattcagcgtactgttttctttagcaaatatggccccgccgttattatattctcctgtaacggtgttattggcaaacagagtcattccagtttcattttctggtaatagactaaattccgctccttgttgcaaaaatacggccccaccgctggcgttattggtcatatcgctaaaaaccagccattgcccatcagcgatactccagtcctgcgtaatgccactaaggctttgcctgctggcctgacaactcgctttgacatcatatccctggcaactatcagtgaccgccgcgacaccgttagcagagaaaagagatgcaatcatactcgggagtaaagataaatactccttgcgtagaaagataatccgcatattaatctaaccatcattttctataagacggcgtatttaatcgcattatacgatatggaatatctttcttttgtaaattgttcaacccggtgcaatggctattttgttattatttgatgaataatatcagtgcgtcataattcaagttaataaccttcagggatatcagttatatttaaactaaattaaagtcatgaataattttcttataatataaggtaaattaacaaaatggcttagcatttaacaataaccgaatagaaaacaaccatttcgccatcaacaatctcttacattcgcttatatattgaccacaactgatacatcagattatgtgatgactcgtgcttagatcaatttttgcaatcattagcaaaaagattaataagccatctatatcaatttatctaacctattatgccgttcaagaaatcgccgaacagttatttttaacaaatttttctcttcccattgactttcccggacaccttgtctgacctaaggtgcgcgaaagccactttttccttcctgagttatccacaaagttatgcacttgcaagagggtcattttcacactatcttgcagtgaatcccaaacataccccctatatatagtgttctaagcagcttcccgtactacaggtagtctgcatgaaactattgcggaaagaattccaaaaacaggtacgacatacatgaatcagaatctgctggtgacaaagcgcgacggtagcacagagcgcatcaatctcgacaaaatccatcgcgttctggattgggcggcagaaggactgcataacgttagcatttcccaggtcgagctgcgctcccacattcagttttatgacggtatcaagacctctgacatccacgaaaccattatcaaggctgccgcagacctgatctcccgtgatgcgccggattatcagtatctcgccgcgcgcctggcgatcttccacctgcgtaaaaaagcctacggccagtttgagccgcctgcgctgtacgaccacgtggtgaaaatggtcgagatgggcaaatacgataatcatctgctggaagactacacggaagaagagttcaagcagatggacacctttatcgatcacgaccgtgatatgaccttctcttatgctgccgttaagcagctggaaggcaaatatctggtacagaaccgcgtgaccggcgaaatctatgagagcgcccagttcctttatattctagttgccgcgtgcttgttcagcaactacccgcgtgaaacgcgcctgcaatatgtgaagcgtttttacgacgcggtttccacatttaaaattagcctgccgacgccaatcatgtccggcgtgcgtaccccgactcgtcagttcagctcctgcgtactgatcgagtgcggtgacagcctggattccatcaacgccacctccagcgcgattgttaaatacgtttcccagcgtgccgggatcggcatcaacgccgggcgtattcgtgcgctgggtagcccgattcgcggtggtgaagcgttccataccggctgcattccgttctacaaacatttccagacagcggtgaaatcctgctctcagggcggtgtgcgcggcggtgcggcaacgctgttctacccgatgtggcatctggaagtggaaagcctgctggtgttgaaaaacaaccgtggtgtggaaggcaaccgcgtgcgtcatatggactacggggtacaaatcaacaaactgatgtatacccgtctgctgaaaggtgaagatatcaccctgttcagcccgtccgacgtaccggggctgtacgacgcgttcttcgccgatcaggaagagtttgaacgtctgtataccaaatatgagaaagacgacagcatccgcaagcagcgtgtgaaagccgttgagctgttcagcctgatgatgcaggaacgtgcgtctaccggtcgtatctatattcagaacgttgaccactgcaatacccatagcccgtttgatccggccatcgcgccagtgcgtcagtctaacctgtgcctggagatagccctgccgaccaaaccgctgaacgacgtcaacgacgagaacggtgaaatcgcgctgtgtacgctgtctgctttcaacctgggcgcaattaataacctggatgaactggaagagctggcaattctggcggttcgtgcacttgacgcgctgctggattatcaggattacccgatcccggccgccaaacgtggagcgatgggtcgtcgtacgctgggtattggtgtgatcaacttcgcttactacctggcgaagcacggtaaacgctactccgacggcagcgccaacaacctgacgcataaaaccttcgaagccattcagtattacctgctgaaagcctctaatgagctggcgaaagagcaaggcgcgtgcccgtggtttaacgaaaccacttacgcgaaagggatcctgccgatcgatacctataagaaagatctggataccatcgctaatgagccgctgcattacgactgggaagctctgcgtgagagtatcaaaacgcacggtctgcgtaactccacgctttctgctctgatgccgtccgagacttctagccagatctctaacgccactaacggtattgaaccgccgcgcggttacgtcagcatcaaagcgagcaaagacggtattttgcgccaggtggtgccggactacgagcacctgcacgacgcctatgagctgctgtgggaaatgccgggtaacgatggttatctgcaactggtgggtatcatgcagaaatttatcgatcagagcatctctgccaacaccaactacgatccgagtcgcttcccgagtggaaaagtgccgatgcagcagttgctgaaagacctgctcaccgcctacaaattcggggtcaaaacactgtattatcagaacacccgtgacggcgctgaagacgcacaagacgatctggtgccgagtatccaggacgatggctgcgaaagcggcgcatgtaagatctgatattgagatgccggatgcggcgtaaacgccttatccggcctacggctcggtttgtaggcctgataagacgcgccagcgtcgcatcaggctccgggtgccggatgcagcgtgaacgccttatccggcctacggctcggatttgtaggcctgataagacgcgccagcgtcgcatcaggcacaggatgcggcgtaaaatgccttatccggcattaaactcccaacaggacacactcatggcatataccacctttagtcagacgaaaaatgatcagctcaaagaaccgatgttctttggtcagccggtcaacgtggctcgctacgatcagcaaaaatatgacatcttcgaaaagctgatcgaaaagcagctctctttcttctggcgtccggaagaagttgacgtctcccgcgaccgtatagattaccaggcgctgccggagcacgaaaaacacatctttatcagcaacctgaaatatcagacgctgctggattccattcagggtcgtagcccgaacgtggcgctattgccgcttatttctattccggaactggaaacctgggtcgaaacctgggcgttcagtgaaacgattcattcccgttcctatactcatatcattcgtaatatcgttaacgatccgtctgttgtgtttgacgatatcgtcaccaacgagcagatccagaaacgtgcggaagggatctccagctattacgatgagctgatcgaaatgaccagctactggcatctgctgggcgaaggtacccacaccgttaacggtaaaactgtgaccgttagcctgcgcgagctgaagaaaaaactgtatctctgcctgatgagcgttaacgcgctggaagcgattcgtttctacgtcagctttgcttgttccttcgcatttgcagaacgcgaattgatggaaggcaacgccaaaattattcgcctgattgcccgcgacgaagccctgcacctgaccggcacccagcatatgctgaatctgctgcgcagcggcgcggacgatcctgagatggcggaaattgccgaagagtgtaagcaggagtgctatgacctgtttgttcaggcagctcaacaggagaaagactgggcggattatctgttccgcgacggtagcatgattggtctgaataaagacattctctgccagtacgttgaatacatcaccaatatccgtatgcaggcagtcggtttggatctgccgttccagacgcgctccaacccgatcccgtggatcaacacttggctggtgtctgataacgtgcaggttgctccgcaggaagtggaagtcagttcttatctggtcgggcagattgacagcgaagtggacaccgacgatttgagtaacttccagctctgatggcccgcgttaccctgcgcatcactggcacacaactgctgtgccaggatgaacacccttcccttctggcggcgctggaatcccacaatgtggcggttgagtaccagtgtcgcgaaggttactgcggctcctgtcgcacacgcctggttgcaggtcaagttgactggattgccgaaccgttagcctttattcagccgggggaaattttgccctgttgttgccgggcaaaaggcgatattgaaatcgagatgtgaattggttgtagtgccagatacaacgcttatgcgtcttatctggcctacaacgattacatggcgtagtaatacgctttcacctgctcccagtccgctttggggattggctccagatatttttccagctggcggaagtcatgattaatcgctttatcgcgacgcaagcggcgacgacttttctccaggtcaagaaaaccagcttctgcattaccttctgttttcacatagatatggcgaacataacaacagccatgctgacgattaatgctatgcattttcttaaacgccagcgccactgctttcaacatggcttgccgtacttcgtcagaataagggcttactgcatgctgggcataccagtcagcaatgctgatgaaccccgccatatcttcagtcaccagcaacgctcgccattcaccctcaattttcaccgcttcaccaaaaacgatcttcggcacgatgacaccggcccgttccagttctttaattaccgcaacctcacggacaatcgttggtcggccgaacggataacgtacggaatgaaacagatgatgcgtcatgcgctttacatacagctttttgccgttgcgctcgacgcattgcaccccgctcataccattacggcgatagttaggctcttcaacccagtcgccctctgttgcccaccagtgattaaattcgtcgtactttgcactaactgccataccctatcgcctgtcatttttattaacgacaatgactataggtggttacctgaggaaaatcttaatgaaacgtgtcgtattaatgaatttcttttgccactactagcttgacaccgcttttacccttcatttgcagcgcatagattccaccagccactaccactaatagtgcgcccagcagataaaatgtgaatttaatcaggcggatacagcgatgaattttattcgacagggattaggcatcgccttacaaccagagttaacgctgaaaagcattgcaggtgaattgtgttccgttcctctcgaaccaactttctatcgacagattagcttgctggctaaagaaaagccggtagaaggcagtccactgtttttactacaaatgtgcatggaacaattagtggcgattggaaaaatttgatatgagacaggatggcgcatgaacgccatcctgcagtaacattactctttattaagaaattttactgccttatcagggaaatcagtaaacagcccatttacacccgctttgttatacagagcatcatataactgattcacatcaggagtgtattcaggcagtttatcactccgcacggtataaggatgcactaccagtttattctgctgagcatcttgcaccatgccagtgagtttgatattacccggctggcttgtctcctcaatcaacatatggtaatccggaccaataccatctgcatattccgccacctgtttcatggcacccggcttaaacatccagtcgtagttgtaattaacccagcttccatccggctgtttctgctgcgtttcattccagtcggtataggcaatcagctgtaccagattgagctccatgcccattttgggttccagctcattcttaatacgcttcagctcatcagcatcaaaacattgcaaataaactttatcgtctttaccggtgtaaccatatttcttcagcacttccagcgtttttgccgcaatatccttcccttcctgatgatggaaccacggcgctttgatttctggataaataccgatatttttcccggtagagtgatttaacccctgaacaaattcaatctcttcttcaaaggtgtgcacccggaagtcggacttacccattgggaaacgccccggataagtctgcacttttttaccgttttcaatatcgaaaccttcggtaaatttcaagctcttaatttcatccagcgtgaaatctatcgcgtagtaacgaccgtctttgcgcgcccgatccgggaaacgatcggcaacatcagtaacacgatcgaggtaatggtcatgcagaacaaccagattgtcgtctttggtcatcaccaaatcctgttccagataatccgctccctgcgcatacgccatcgcttttgctggcagcgtatgctccggcaaatatccactggcaccgcgatgggcgatgactattttttcgttgctgtccgccgccattgcactgcttcccatgactatagtgctcatcatgatcgccatgctaaggtttttcagcgtcaatttcatgccattagcctccgttgcgttcttgcagtaattgttcatggcgacgtttttcgccaatcatcacaacaatcaacaagataaccgccagaatgctgccgccaatcattaccataaagccgccatcccagccgaagaagtccacggtgtagccaacaatcgcgctcgccgccacgctaccgcccaggtaaccaaacagcccggtaaagcccgctgccgtacctgccgcttttttcggtgccagttccagcgcatgcagaccgatcagcatcacaggaccgtagatcaggaagccgataacaatcatacaaatcatatcgacggttgggttacctgccgggttcatccagtaaacgatagtcgcgatggtcaccagtgtcataaagaaaacgccggttgccccacggttgccacggaagactttatcgttcatccagccgcacagcagagtgcccggaatacctgcatattcataaaggaagtaggcccaggaggatttatctagcgcgaaatgcttaacctctttcagataagtcggactccagtcgaggatgccgtaacgcagcagataaacgaacacgttggcgatggcgatataccacagcagtttgttcggcagtacgtactgcatgaagatttgcttcgccgtcagctcctgttccgctttttcgttatagtcgtccggataatcatttttgtactcttcgatcggcggcaagccacaggattgcggggtatcgcgcatcatcgcaaaggcgaataatgccaccagaatggcgcagaaagcaggcatatagagcgccgcatgccagtcattgaaccaggccatccccagcaggaacagcagcggcggaataccaccaccgacgttgtgcgcacagttccacacactcacaatgccgccacgttctttctggctccaccagtgcaccatagtacgaccacacggcggccaccccatcccctggaaccaaccgcagaggaacaacagtacaaacatcaccgcaatgctgctcgtcgcccatggcacaaagcccataaacaacatcactgccgccgccagaatcaaacctgcgggcaggaaaacgcgcggattgctgcgatcgcttacgctacccatgatgaatttgctaaatccataagcaatgctgatcccgctaagggcaaaacctaaatcaccgcgactgaatccctgctcaaccagataaggcatagcaagcgcaaagttcttacgaaccaaatagtaagccgcatagccaaagaatatccccaggaaaatttgccagcgcaatcgacgataagtcggatcgatctccgcggcaggtaagcgcgctttgtgtggcgctggtttaaaaatactcaacattgatagcctccgtggcccgtggtcttatttatgattaacagcctgattcagtgagagaacctgccgtttcttgagttgccgcgatgttaagaaaacattcataaattaaatgtgaattgccgcacacattattaaataagatttacaaaatgttcaaaatgacgcatgaaatcacgtttcactttcgaattatgagcgaatatgcgcgaaatcaaacaattcatgtttttactatggctaaatggtaaaaaacgaacttcagagggataacaatgaaaactcgcgacagccaaagtagtgacgtgattatcattggcggcggcgcaacgggagccgggattgcccgcgactgtgccctgcgcgggctgcgcgtgattttggttgagcgccacgacatcgcaaccggtgccaccgggcgtaaccacggcctgctgcacagcggtgcgcgctatgcggtaaccgatgcggaaagcgcccgcgaatgcattagtgaaaaccagatcctgaaacgcattgcacgtcactgcgttgaaccaaccaacggcctgtttatcaccctgccggaagatgacctctccttccaggccacttttattcgcgcctgcgaagaagcagggatcagcgcagaagctatagacccgcagcaagcgcgcattatcgaacctgccgttaacccggcactgattggcgcggtgaaagttccggatggcaccgttgatccatttcgtctgaccgcagcaaacatgctggatgccaaagaacacggtgccgttatccttaccgctcatgaagtcacggggctgattcgtgaaggcgcgacggtgtgcggtgttcgtgtacgtaaccatctcaccggcgaaactcaggcccttcatgcacctgtcgtggttaatgccgctgggatctgggggcaacacattgccgaatatgccgatctgcgcattcgcatgttcccggcgaaaggaagcctgctgatcatggatcaccgcattaaccagcatgtgatcaaccgctgccgtaaaccttccgacgccgatattctggtgcctggcgataccattagcctgattggtaccacctctttacgtattgattacaacgagattgacgataatcgagtgacggcagaagaggttgatattctgctgcgtgaaggggaaaaactggcccccgtgatggcgaaaacgcgcattttgcgggcctattctggcgtgcgcccgctggttgccagcgatgacgacccgagcggacgtaacgtcagccgtggcatcgtgctgctcgaccatgctgaacgcgatggtctggacggatttatcaccatcaccggtggcaaactgatgacctatcggctgatggctgaatgggctaccgacgcggtatgccgcaaactgggcaacacgcgcccctgtacgactgccgatctggcactgcctggtagtcaagaacccgctgaagttaccttgcgtaaagtcatctccctgcctgccccgctgcgcggttctgcggtttatcgtcatggcgatcgcacgcctgcctggctgagcgaaggccgtctgcaccgtagcctggtatgtgagtgcgaagcggtaactgcgggtgaagtgcagtacgcggtagaaaatttaaacgttaatagcctgctggatttacgccgtcgtacccgtgtggggatgggcacctgccagggcgaactctgcgcctgccgcgctgccggactgctgcaacgttttaacgtcacgacgtccgcgcaatctatcgagcaactttccaccttccttaacgaacgctggaaaggcgtgcaacccatcgcctggggagatgcactgcgcgaaagcgaatttacccgctgggtttatcagggattgtgtggtctggagaaggagcagaaagatgcgctttgatactgtcattatgggcggcggcctcgccggattactctgtggcctgcaactgcaaaaacacggcctgcgctgtgccattgtcactcgtggtcaaagcgcactgcatttcagttccggaagcctggatttgctgagccatctgccagatggtcaaccggtgacagacattcacagtggactggaatctttgcgtcagcaggcaccagcccatccttactcccttctcgagccacaacgcgtgctcgatctcgcttgccaggcgcaggcattaatcgctgaaagcggtgcgcaattgcagggcagcgtagaacttgctcaccagcgggttacgccgctcggcactctgcgctctacctggctaagtagcccagaagtccccgtctggccgctgcccgcgaagaaaatatgtgtagtgggaattagcggcctgatggattttcaggcgcaccttgcggcagctagcttgcgtgaactcggccttgccgttgaaaccgcagaaatagagctgccggaactggatgtgctgcgcaataacgccaccgaatttcgcgcggtgaatatcgcccgtttccttgataatgaagaaaactggccgctgttacttgatgcgcttattcctgtcgccaatacctgcgaaatgatcctgatgcccgcctgcttcggtctggccgatgacaaactgtggcgttggttgaatgaaaaactaccttgtagtctgatgcttttgccaacgctgccgccttccgtgctgggcattcgtctgcaaaaccagttacagcgccagtttgtgcgccagggtggcgtgtggatgccgggcgatgaagtgaaaaaagtgacctgtaaaaatggcgtagtgaacgaaatctggacccgcaatcacgccgatattccgctacgtccacgtttcgcggttctcgccagcggcagtttctttagtggcggactggtagcggaacgtaacggcattcgagagccgattctcggccttgatgtgctacaaaccgccacgcggggtgaatggtataagggagatttttttgcgccgcaaccgtggcagcagttcggtgtaaccactgatgagacgctacgcccgagtcaggcagggcaaaccattgaaaacctgtttgccatcggtagcgtgctgggcggatttgatcccatcgcccagggatgcggcggcggtgtttgtgccgtcagtgctttacatgccgctcaacagattgcccaacgcgcaggaggccaacaatgaatgacaccagcttcgaaaactgcattaagtgcaccgtctgcaccaccgcctgcccggtgagccgggtgaatcccggttatccagggccaaaacaagccgggccggatggcgagcgtctgcgtttgaaagatggcgcactgtatgacgaggcgctgaaatattgcatcaactgcaaacgttgtgaagtcgcctgcccgtccgatgtgaagattggcgatattatccagcgcgcgcgggcgaaatatgacaccacgcgcccgagcctgcgtaattttgtgttgagtcataccgacctgatgggtagcgtttccacgccgttcgcaccaatcgtcaacaccgctaccagcctgaaaccggtgcggcagctgcttgatgcggcgttaaaaatcgatcatcgccgcacgctaccgaaatactccttcggcacgttccgtcgctggtatcgcagcgtggcggctcagcaagcacaatataaagaccaggtcgctttctttcacggctgcttcgttaactacaaccatccgcagttaggtaaagatttaattaaagtgctcaacgcaatgggtaccggtgtacaactgctcagcaaagaaaaatgctgcggcgtaccgctaatcgccaacggctttaccgataaagcacgcaaacaggcaattacgaatgtagagagcatccgcgaagctgtgggagtaaaaggcattccggtgattgccacctccagtacctgtacatttgccctgcgcgacgaatacccggaagtgctgaatgtcgacaacaaaggcttgcgcgatcatatcgaactggcaacccgctggctgtggcgcaagctggacgaaggcaaaacgttaccgctgaaaccgctgccgctgaaagtggtttatcacactccgtgccatatggaaaaaatgggctggacgctctacaccctggagctgttgcgtaacatcccggggcttgagttaacggtgctggattcccagtgctgcggtattgcgggtacttacggtttcaaaaaagagaactaccccaccagtcaagccatcggcgcaccactgttccgccagatagaagaaagcggcgcagatctggtggtcaccgactgcgaaacctgtaaatggcagattgagatgtccacaagtcttcgctgcgaacatccgattacgctactggcccaggcgctggcttaaactcctttctgatgcccggtaagcatgtggttaccgggcatttttgcgtacacgattccgtgcccaatgtatgcgttgcaacgcagtgaaaattcctctgaaaacgtctcgcaaaggctgaaactggcagatgtcaaaggcctgggataaccgtaatgtcgcgtcatcataaatatcaggtgacggacaaccatgaccgaaagtacaacctcctccccgcatgatgcggtatttaaaacctttatgttcacacccgaaaccgcacgggattttctcgaaatacatttaccagaaccactgcgcaagctttgcaacctgcaaaccttacgcctggaacccactagttttattgaaaaaagtttacgcgcttactacagcgatgttttgtggtccgtggaaaccagcgacggtgacggctatatctactgcgtgattgaacatcaaagctctgcagaaaagaatatggcttttcggctaatgcgctatgccactgccgccatgcagcgtcaccaggacaaaggctatgacagagtcccgctggtggtgccgttgctgttttatcatggcgaaaccagcccttacccgtacagtctcaactggctggatgagtttgacgatccgcaacttgcccggcagttgtacaccgaagcttttctgttggtggatatcaccatcgtacctgacgatgagatcatgcaacatcggcgtatagctctgctggaactgattcaaaagcatattcgcgaccgcgatttaatcggcatggtcgacaggatcaccacgcttttggttagaggcttcactaatgacagccagctacaaacactgtttaattatctgctgcaatgcggcgatacctcccgtttcacccgttttattgaggagattgccgaacgtagtccactacaaaaggagagattaatgactattgctgaacggctacggcaggaagggcatcaaattggctggcaggaaggtatgcatgaacaagccattaaaattgctttgcgcatgctggagcagggctttgaacgtgagattgtgctggcgacaacccaactcactgatgctgatattccgaactgtcattaaaaggagagattaatgactattgctgaacggctgcggcaggaaggacatcaaattggctggcaggaaggtaaattagaaggtttgcatgaacaagccattaaaattgctttgcgcatgctggaacagggctttgatcgtgaccaggtgctcgcggccacccagctaagcgaagccgatctggcagcgaataaccactaattaacacaggcccacagccgatccccatgggcctttgatatcaataactaccttttatgcgtggcccatttttgccacttttaaacatcgccagtcgttgatccagggcatcgctgtagagcatcgtgtcaacgccaacagcgacaaagttcgctccccacgccaggcattgctgcgccatatcaggagccacagccagaaaaccagccgctttacccgcagcacggatccgccgaatactggtttcaataattcgctgcacttccgggtgcccggcgttatccgggtagcccaagctcgcagaaagatccgcaggtccaataaacacgccatcaatcccttcgacgtcgaggatttcgtccaggttatccagtgccgttttactttccacctgcaccaacagacaaaggctatcgttaacttgcgccatgtaattctcaatgcgtccccagcgcgcagcccgtgccacactggccccgacaccacgctcaccgtagggaggatagcgcgtggcagacaccacctgacgtgcctgttcggcagtatcgaccatcgggatcagtagagtttgcgcgccaatatccaggacttgtttaatcagcggtttactgccttccaccggacggatcacgggttggctggcatagggcgctaccgcctgtagctgatgataaagatcctgaatggtgtttggcgcgtgctccccgtcaatcagcaaccagtcataaccagaagtggcggcaatttctgccatataggcagtcgtactgcttaaccacagaccaatttgcacttcgcccttgcgtaaacgttctttaaagggattgcttaataatgcgttcatcgtgttccttaacctatttaatgatgtgccacgtcggtctgcgcaacagtgcgatttacacgcagagtgaaaataatcaggctaccgatgaccgccaccgctgccagcgtcagtaatcccgccgcatcgctggcaaataacgtttctgctttcacgcgcaggatcggggcaataaacccgcccactgcaccaaacaggtttacaaaaccaattcccgcagccagcgccgtaccggaaagcagttgtgtcggcatcgtccagaacactggctgcacggcaataaacccgatagctgcaacacacagcgctacgatcgccattactggagaaagcagcccggacagaccaataccaatgcccgccgccagtaatgtcagcgctgcgacattacgccgttcgccggttttatcggaatagcgcggaataagccaggtcccaaacaaggccgcaacccacggaatggcggtgaccacgctcgctgtaaagcccacttttgttcccagcaatgccgcaacctgggtcggcaggaagaaaattaatccgtaaaccgccacctgaatggtcaggtagataatcgctagttgccagactcggccattacgcagcgcatcgctcagccgagaagtcactttctgttgttcttcacttgccagttgattgataagcaacgttttttcttgtttactcagaaaacgtgcctgctccggtgtgtcatcaagccaaaagaatgtgaataccccagcaccgactgccaacaatccttcaatcacaaacatccagaaccagccgggatgccccataaatccatgcatctccaacagcgcgccggaaagcggacttcccagtgttaacgccagcggtgcgcccatatagaacagccccataatgctggcgcgattacgctgcggaaaccattggctggtgagataaatcataccagggaaaaatccggcctccgcagcacgaagcagagtgcgaactatcagaaatttcgcttcagtatcggcccatgccatggctgcgctaagaaatccccacagcagtgttgtcgtaccaatccaggttctggcccccagtttgcgcatcaaaagattcgccggaacacccagaaacgcatataccacaaagaaaatgcctgctcccagcgcataagcttcattactcaacccggtatcaatctggtaggtctgtttggcaaaaccgatattgctacggtcgagaaacgccagcacatacagcgccaacataaacggaattaaacgcacacggtttttcttcaccacggcgtcaagcaaagcggtgctcataaaaagctccttagaatatgtgggcgttaccgttgtcacagcaacgcccggagtgattagtggctgtaggggcgtttcaaattgcagtcatgattgagttcgacgccaaaaccgggtttatcaagcacacttttatgaatacgaccattcaccggaaccggctcattgagcagaatcgggtcaaactgcggacgcatcgtactacaatccgggctggtcatcaggaattcgctgaatggcgtattggtgaaggtgatcaccgcatggtgagagtaaacagagctaccgtgcggcaccaccagttgccccctggatttggcgattgcggcaatttccaccagcgtggttaaaccaccgcaccagccaacatccggctgcataatgtcgataccggtttcactaagcgtacgaaaagattgcagtgtgccgtggtgctcaccgctggtgaccatcattccgactggcgcgttgcgtttcagttcgcgataactttcatactgctgtggcggcaggcactcttcgatccatttcaggttatagggcgcgcaagcgtgggccagtttggtcgcatagttcacgtcctgactcatccagcagtcgagcattaaccagaaatcctcaccgcatttttcacgcatatccgcgaccatagcggcatctttgcggatccccgcatcgccatcatgtggcccccagtgcgtcggcattttgccaccgataaagcccatctcttttgccagatccggacgcgcacctgtggcgtagaactgaatctcatcacgaacagcgccgcctaaaagtttataaaccggaagcccgaccactttgccgaacagatcccacagagccagatcgacacaagaaatcgtattcatcaccaggccaccagagccggagtaatacagggtggcactgagcatttgatcgtggatcagtttgatatcactgacacatttaccctcaatgaaacggttaagatgtttttcgacaataaaacagcccatttcaccggctgtgctaacggcgaatccggtctggccgttttctgcttcgacttcaacaaccaacgtgccaagaacgttaatgccaaaactctggcgactctgctcgtaatcgcggtatttactcatcggggtggcaatatgatcgtctatccagtgattcgccccctggtcgtgataatcaccgccgccagcgcctttttctgctgtcgcaccgccagtaaaccaggcgcgaacctgtttaatttttggtagggtcatgatgttctccattgttaactggcttgtaagtcaaagggacttttccatcccaacagacgactaatatccctggcgcaggcaatggccttgcccgccagataatcacggtattcttcattgatttgtaagcgggtaccgaccacgctgatcgcagcggtaagctcgttattggcgttaaacaccggcgcagcgacacaacggacatcggcgtaatcttcgccgttgtcatagctccagccctgacggcgaatacgcgccagttcttcgtgaagttgctgtggatgagtaatcgttgtgggtgtcgcctgctcccagaccagcccttcgataatactttgctgtaccgctgcaggttgccaggcaagcaggcatttacctattccggagcgataaaggctaaggctttttccttcatgggaacgcacgctgatagtggcactactctccactttcaaaatgtaataagcgctgccgttatcaataatccccaggtgacataacagcccggtggtatccatcagttgcgtcaaacgcggtcgagccagttcccggagatccatcttgcttaacgcatgaccggaaagctccaccagcctggtccacaaacaaaaattttcctggtgatcaaggctaagaaaacgctgacgcctgagttcattaagcagcaaataggccgtgcttttagggattcccaatgtgtcaatgatcgtcgcagcactacaggggccaatgcgggcaatcaaattgagaatatcaatagcccgtgtcagggcgggaactttgctactttccaacatactggactccagtcttagatactggaatcagtctcgttgctcagggggagtaaaattgtgaagcgcatcaaatcccgctcctcgtccagcagactggagaaattacgcacaaatttgtgaatcagcgcacggattttttcttattgagtacaacaggttggacaaattttgccggagggggaatgtgccggtgcagtaaaccggcacagagtggcggaatcagacagataaggtcatggactcaacaacctcaatccagccatgctcactggcgatatcctggccgtttaaccaacggcgcagcatattcagtgccatcattgcgcacacttcctgacggatagccaggctgtagcgcgtagtgctgaaacgcacacgcagagcgaaagtgccgtctggcgtggctagcgcaaagttgagatgctcgttctcgaaaccgctaacagccagtgccagcccggcaaaatggttggcccgccgttctgtaatccagtgcgcagtttgcgccagggtttcctcctgactaggaaccacttcacacgccagcaatggagcacctgcgcgagaaagttgcaaagccaataaaccaccggtgaattgctcgctcaacgtcaggctgaactggcggttttgcaattcgcgactgatctgcgcgggcagtccttcagtgccttcgaaaatcacgctctgtccggcaacacgtttaacatccagccacagtttttccatcgcctgttgctcgcttgccggtccggtgagtttcagttcgatgataggcatactggagcgatagcccattgttacgcccggcggcagttgtagagtgtccaggctttgtgccagatcgctttcgctacgaccaaaagtagtcaaacgcagacaaaccggcggctgcggtaaagaaaaacgctcgcgcaggcgcggcaggatttcgtgctcgaccatcaccttaaattcactcggtacgccgggagtaaagaacatcaggcaacgattaagctgcacggcaaaaccacaggcggtgcctaccgggttattgataaattcagcactggcaggcagctccgcttgtttacggttgctcggtgccattactcgtccacgttcgtggaaatagcgttccatctctttgagccaggcttcatgcagcaccaggccttcaccttttgctgtcgcagcggcgagtgcgcttaaatcatcgctggtcggtcccagcccgccgttaacgatcagcacatcggcgtgctgactacgttcgcgaagaatggtgactaagtcatcaaggttatcccccaccgtattgcggcgagataatggcaacccctgatgaaagaaaaaatcggccagccaggcagcgttagtgtcaacgatttgcccgtgtaacacttcatccccggtggataacatttccacttttaacatggttatctcctgcttttgttatcgaatcactataacgcaaagggagataaggcgtagtaagaaactgaatggcgcgacagaatgccgcgccggaagggatcagaaactggcgttaaccccaacatacgggccgtcagccacggcgttgtcgcggttaccgtctttaccgctcagattcaggtagcgataacccgcctcaatactgactggacgcataatggtgtaacgcgcgccagcattcgcttcttcataactttgaataccgctggagaggctatccggagagtagtaatactcgccaaacaaacggaagctgttgccaattttccactgcaaaccacctcctaccgctgcggcataaccttcatcgccgtaattcgggttggtgtaaacgccttttccgccaacggtcgccattaacggcccgagaggcagattcaaccccagccccacgccagcgacatcaccgtcgtcgtcgttatgtgtccagttaccgcttaacgccaggcccgtcgtttcagtcccaaaaccgacaccaatattggtgtattctttacccgcctgaccgctgatgctcattgcattgacgcttgcagaaaccaacagcattccggccagacctgctagcgcaatttttttcattatcccctttcccacaagcaattaatcaaaattcccaaagctgcgggattgtactgcctggcacagaggattcaatgagcgaaaaaaaggatctagtcacttattgtaactaaatacttcttaaataattaaatgccgaaaaaataaacacactttatcgatacacacaaaaataataataagtacagttatcatcgcaaaagagattactgtcactttcacatatttgtgagttaccgtattctcatggtttctttttatttataaggaatatccctgtgcgacaacggactattgtatgccctttgattcaaaatgatggtgcttatttgctgtgtaaaatggccgacgatcgcggcgttttccccggtcaatgggcgattagcggtggcggcgtggagcctggcgaacgaattgaagaggcactacgccgcgaaattcgcgaagaactgggagaacagctgcttttgacagaaatcacgccgtggaccttcagcgatgatattcgcaccaagacgtatgcagatggtcgcaaggaagagatttatatgatttacctgatttttgactgcgtttctgccaaccgagaagtgaaaataaacgaagagtttcaggactacgcgtgggtaaaacctgaagatctggtgcattatgatttgaatgtcgccacccgaaaaacgttacgtttgaaaggtcttctgtaacaatgatgacagccattactggctgtcagattgaaaatttagtggttaacgaattccccatccagataaactttgcctttttccacatgcatgactaaaccatccagataatcaggtttaaatgtcgcgtcacgcttatctttagcaatatatgtcaggcaatgattatgggtgaaaataacgatatttttatcaggcgctttgctttgtaagtccttaattgcactataaatctcattaccgcactgaagaagtcgtttatctaccgtcaattttttacccgcactaaaccaggtagcgctctgaatggtccggacggtattactggaataaagatcgaaatcagggatatcagcactaaaagcgttgcccagttcacgggcatcctgggtacctttaaccgtaatacctgttttatcactcaagcattgattggtactacggtcgcaacgttcagcatgacgaaacaaaacgacaaccgggtgctgctgtgccagtctggccagtgttttattgtcgatacgtggcaaaccattgctactccaggcggcatgagtacccagtccggcaattgcagcgagcgccagtaaaatgatgatatattttttactcttcaagctagagcggcaaaaagctaacacgtaaactccacctatagacaagcgcaaccagacaattaccgtgaaattgagctacatttctggcgataattcgcagttggtgtaatattaaaaatcctacgatgtcggcaaaatgcctcaaaattttgccaaatgcaaagcctaaataagaaaaaatataaaaatttcaatatttacgtctaatattagtttcttaaggttaagttaatattctatccttaaaatttcgctccaaatggcaaaatatacacaacactctttatagcaaatataagtggacaggtattcaatggcggaaggaaaagcaatgagtgaatttttgccttttagccgaccagcaatgggcgtggaggaactcgctgcagttaaagaggttctcgaatccggttggatcacaaccggtccgaagaatcaggcgcttgagcaagctttttgccagttgacgggaaatcagcatgccatcgcggtcagtagtgccaccgccggaatgcatatcacgctaatggcgttgaaaattggcaagggcgatgaagtgattacgccttccctgacctgggttagtaccctcaatatgatttccttgttgggtgcaacgccggtaatggtggatgtcgaccgcgatacgctgatggtcacgcctgaagctatcgagagtgccattacgccacgcactaaagccatcattccggtgcattatgccggtgcgccagcagatattgacgccattcgcgccattggcgaacgttacggcatcgcagttatcgaagatgctgcccatgccgtcggtacgtattacaaagggcgacatattggcgcaaaaggtaccgctatttttagttttcatgccattaaaaatattacctgtgctgaaggtggcctgattgtaactgataatgaaaaccttgcccgccagctacggatgctgaaatttcacggtctgggtgtcgatgcctatgacagacaaacctggggccgtgcaccgcaggctgaagtcttaacaccgggctataagtacaatctgaccgatattaacgccgcgattgccctgacacagttagtcaaattagagcacctcaacacccgtcggcgcgaaattgcccagcaatatcagcaagcactggcagctctcccctttcagccattaagccttcccgcctggccgcacgttcacgcctggcatctgtttattattcgtgtcgatgaacaacgttgtggtatcagtcgcgatgcgttgatggaagcgttaaaagaaagaggcattggtaccgggttacatttccgcgccgctcacacacaaaaatattatcgcgagcgttttcccacgctgagcttaccgaataccgaatggaatagcgaacgcatctgttctttgccgctgttcccggatatgactaccgccgatgccgaccatgtcatcacagcccttcagcaactcgcaggacaataagccatgtttgaaatccaccctgttaagaaagtcagcgtggttattcccgtttataacgagcaggaaagcttaccggaattaatcaggcgcaccaccacagcctgtgaaagcttggggaaagagtatgagatcctgctgattgatgacggcagtagcgataattccgcgcatatgctggtcgaagccagtcaagcggagaacagccatattgtgtctattttgcttaaccgcaattacgggcaacatagtgcgattatggcgggattcagtcacgttactggcgacttaattattacccttgatgccgatctccagaatccgccagaagaaatcccccgcctggtggcaaaagccgatgaaggttacgacgtggtagggactgtacgccagaaccgccaggacagctggtttcgtaaaaccgctagcaagatgattaaccggcttattcagcgcaccactggcaaagcgatgggtgattacggttgtatgctgcgcgcctatcgccgtcatattgtcgatgcgatgttgcactgccatgaacgcagcacctttatcccgattctggcgaatatcttcgcccgccgtgccattgaaattccagtacatcatgccgagcgtgagtttggtgaatccaaatacagttttatgcgcctgattaatttgatgtacgacctggtgacctgccttaccacaacgccgctacgtatgctgagtctgctcggcagcattattgcgattggaggttttagcattgcggtgctgctggtgattttacgcctgaccttcggaccacaatgggcggcagaaggcgtctttatgctatttgccgtgctgtttacttttattggcgctcagtttatcggcatgggattactcggtgaatatatcggcaggatctacaccgatgtccgcgcccgcccccgctattttgttcagcaagttatccgtccatccagcaaggaaaatgaataatgaaaaccgtcgtttttgcctaccacgatatgggatgcctcggtattgaagccctgctggctgccggttacgaaattagcgccatttttacccatactgataatcccggtgaaaaagccttttatggtagcgtggctcgtctggcggcggaaagaggcattccggtttatgcgccggataacgttaatcatccgctgtgggtggaacgcattgcccaactgagcccagatgtgattttctctttttattatcgccatcttatttacgacgaaattttgcagctcgctcccgcaggtgcatttaatctgcatggtagcctgttaccaaaatatcgtggtcgcgcgccgctgaactgggtgctggtcaacggtgaaacggaaactggcgttacattgcaccgaatggtgaaacgtgccgatgccggggccattgtggcgcaactgcgcattgccattgcgccagacgatatcgctattacgctgcatcataaattgtgccatgccgcgcgccagctactggaacagacattacccgccattaaacacggtaatattctggaaatcgcccagcgcgaaaacgaagccacctgttttggtcgcagaacgccggatgacagtttccttgaatggcataaaccggcatccgtactgcacaacatggtacgtgccgttgccgatccgtggccgggtgccttcagctatgttggcaatcagaaattcaccgtctggagcagccgtgttcatcctcatgccagcaaagcacagccggggagcgtgatttctgttgcgccactgctgattgcctgtggcgatggcgcgctggaaatcgtcaccggacaggcgggcgacggcattactatgcagggcagccaattagcgcagacgctgggcctggtgcaaggtagtcgcttgaatagccagcctgcctgcaccgcccgacgccgtacccgggtactcatcctcggggtgaatggctttattggcaaccatctgacagaacgcctgctgcgcgaagatcattatgaagtttacggtctggatattggcagcgatgcgataagccgttttctgaatcatccgcattttcactttgttgaaggcgatatcagtattcattccgaatggattgagtatcatgtcaaaaaatgtgatgtcgtcttgccgctggtggcgatagccacgccgattgaatatacccgcaacccgctgcgcgtatttgaactcgattttgaagagaatctgcgcattatccgctactgcgtgaagtaccgtaagcgaatcatcttcccgagtactagtgaagtttatgggatgtgtagcgataaatacttcgatgaggaccattctaatttaatcgtcggcccggtgaataaaccacgctggatttatagcgtaagtaaacaattacttgatcgggtgatctgggcctatggcgaaaaagagggtttacagttcaccctcttccgcccgtttaactggatgggaccacgactggataaccttaatgcagcgcgaattggcagctcccgcgctattacgcaactcattctcaatctggtagaaggtagtccgattaagctgattgatggcggaaaacaaaaacgctgctttactgatattcgcgatggtatcgaggcgttataccgcattatcgaaaatgcgggaaatcgctgcgacggtgaaattatcaacattggcaatcctgagaacgaagcgagcattgaggaactgggcgagatgctgctggcgagcttcgaaaaacatccgctgcgccatcatttcccaccgtttgcgggctttcgcgttgtcgaaagtagcagctactacggcaaaggatatcaggacgtagagcatcgtaaaccgagcatccgcaatgcccaccgctgcctggactgggagccgaaaattgatatgcaggaaaccatcgacgaaacgctggatttcttcctgcgcaccgttgatcttacggataaaccaagttgacctaagatcttacggataaaccatcatgaccaaagtaggcttacgcattgatgtcgatacctttcgtggcacccgtgaaggcgtgccgcgtctgctggaaatcttgagtaagcataatattcaggccagcatttttttcagcgtcggcccggacaatatgggccgccatctctggcgactggtgaagccacagtttttgtggaagatgctgcgcagtaacgcggcaagcctttatggctgggatattttactggcaggtacggcctggccaggtaaagagattggtcatgccaatgccgatatcattcgtgaagcggctaaacatcacgaagtcggcctgcacgcctgggatcaccatgcctggcaagcccgtagcggtaactgggatcggcaaacaatgatcgacgatattgcacgcggtcttcgcactctggaagagattatcggtcaaccggtaacctgttctgccgctgcgggctggcgtgccgaccagaaggtgatcgaagcaaaagaagcgttccatttgcgctacaacagcgattgtcgtggggccatgccgttccgtccattgctcgaaagtggaaaccctggcactgcgcaaattccggtgaccttacccacctgggatgaagtgattggtcgggatgtgaaagcagaagattttaacggttggttactcaaccgcatcctgcgagataaaggcacgccggtttataccattcatgcagaagttgaaggctgcgcttatcagcataattttgtggatctcctcaaacgcgcagctcaggaaggcgtgacattttgccctttaagcgaactgttaagtgagacgttgccgctcggacaagttgttcgcggaaatattgccggacgtgaaggctggctgggttgccaacaaattgcgggtagtcgctgatgaaaagcgtacgttaccttatcggcctcttcgcgtttattgcctgctattacctgttaccgatcagcacgcgtctgctctggcaacccgatgaaacgcgttatgcggaaatcagtcgagaaatgctggcatccggcgactggattgtgccccatctgttagggctacgttatttcgaaaaacccattgccggatactggattaacagcattgggcaatggctatttggcgcgaataactttggtgtgcgggcaggcgttatctttgcgaccctgttaactgccgcgctggtgacctggtttactctgcgcttatggcgcgataaacgtctggctctactcgccacagtaatttatctcagtttgtttattgtctatgccatcggcacttatgccgtgctcgatccgtttattgcattctggctggtggcgggaatgtgcagcttctggctggcaatgcaggcacagacgtggaaaggcaaaagcgcaggatttttactgctgggaatcacctgcggcatgggggtgatgaccaaaggttttctcgcccttgccgtgccggtattaagcgtgctgccatgggtagcgacgcaaaaacgctggaaagatctctttatttacggctggctggcggttatcagttgcgtactgacggttctcccttggggactggcgatagcgcagcgggagcctaacttctggcactattttttctgggttgagcatattcaacgctttgcactggatgatgcccaacatagagctccgttctggtactacgtgccggtcatcattgccggtagcctgccgtggctgggattactccccggtgcactgtacacaggctggaaaaaccgcaagcattccgcaaccgtctatttgttgagctggacgataatgccgctgctgtttttctccgtcgctaaaggtaaattgcccacctatattctttcctgctttgcatctctggcaatgctgatggcgcattacgctttgctggcagcaaaaaataatcctctggcgctgcggattaatggctggattaacatcgcttttggcgtcactggcattattgccacatttgtggtctccccgtggggaccaatgaacacgccggtgtggcaaaccttcgagagctataaagtcttttgtgcctggagcatttttagcctatgggcatttttcggctggtacaccttaacaaacgtcgaaaagacctggccttttgccgcgctttgcccgctggggctggcgttgctggtaggatttagtattcctgacagagttatggaaggaaaacatccgcaattttttgtcgagatgacacaagaaagtcttcagccaagccgctatattcttactgatagcgtcggtgttgccgcaggtctggcatggagcctgcaacgcgatgacatcatcatgtatcgccagacaggtgagttgaaatacggccttaattatccggatgcgaaagggagatttgtcagcggtgatgagttcgcaaactggcttaatcaacatcgtcaggaggggattattactctcgtgcttagcgttgaccgcgatgaagatatcaacagtctcgccattccgcccgcagatgccatcgatcgtcaggagcgtctggtgctgattcagtatcgtcccaaatgatctggctaacattagtctttgccagcttgcttagcgttgccgggcagttgtgtcagaaacaggcaacctgctttgtggcgataaacaaacggcgcaaacatatcgtgctgtggctgggactggcgctggcttgtcttggtcttgccatggtgctctggctgctggtcttgcagaacgtaccggtaggcattgcttacccgatgttaagtctgaattttgtctgggtgacgctggctgcagtaaaactgtggcacgaaccggtaagcccgcgtcactggtgtggggtggcgttcattattggcggcattgtgatcctcgggagtacggtgtaatgggcctgatgtggggattattcagcgtcattattgccagtgttgcgcaattaagcctgggttttgcggcgagtcatctgccgccgatgacgcacttatgggattttatcgcggctctgttagcttttggcctggatgcccggatactgttactcgggctgctgggttatctgctttccgttttttgttggtataaaacgcttcataaacttgcgctaagcaaagcctatgccttgctcagtatgagttatgtgctggtatggattgctagtatggtacttcccggctgggaagggacttttagcctgaaagcactactgggagtagcctgtattatgagcgggttgatgctgattttcctgcccacgacaaaacaacgttactgagttttccctgccactttacactgccgttcccactcatcggggctataactgcttgcgctgaggactttcaccgtatgcagcttttcacgattaatacaataaagcgcattctgcaaagggctgagtaaatcccccactttcacggcgaagtcactcttcacttcggcgatcatttttatcgcgccgccagcatcgcagagcataagtacatgtctgttatcttgtttattgcagcagctttttttgaccagccattccattgcattatcctgtttgctaagagttttcacatcaatttacagattaacagataaactctttatcaacggcaatggaatggcagaaatgagaagtgaaacggagggttaattattgctgacgttgcacccactcttttagcgcctgacgactaattttaataccgccgtttttcagctccggcggcagagttagccagcgcaccggttgttgaaaacgggccagcttatctttcacccattcactaagatcaacgctctcgtggtcatactccatcaccgccaccggtcgatgaccaaactccttgtcggcaacggggacgataaacacctgcaaaaccgcaggatgtgcagcaattacgcgctcgacttcttccggctgaataccctctccgccactgaagaatagattgtctaaacgtccgacaatggtcagcttgccattatgcatctcaccgcgatcgcgcgtagcgtaccagccttcgtcattaaccagactaaccagttgcccgttacgccagtaaccttctgccatactggcagcccgcagccacacttcattattaacgattttcacttcccgacccggcagcgggctaccaacgtctgccaggccgtcggcttctttcgcacacaccgtggaggcaaactcggtcagaccatagccgcaaaagcaacgaatcccctgctcgcgcgcctgttccgtcaactcgaccgggatagccgcgccgccaagtaacaccgctttcagggaaacggaactacggttaaccagcaaacgccagagttgtgttggcaccagactagcgtgagtacagcctgccagcatttgctccaatggctgtttatcacgtaccgtcatccgcgcaccagcgtataaccagcgccacataattccctgaccggagacgtgaaacagcggtaaagagagcaaccaatcatcgtgatcgccaaacggaatcaggcttaacacaccttgcgcactggcaagatgggcctgataagtatggacagcggctttcggcaaaccggtagaaccgctggtcaacgtcatactgcacagacgcgtcggctgccacgtagcggcatgtgcgccttcaaccagctgaatgtgcaggctcgttaatgccggaaacgtgttttccccatccggcaccagagcaaattgcagcgtcagattgggcagcaattcttcaagcaacggttgcggcagctgagggttcacgggcaacacccgcgccccgcattgcagtaacgccagccaggcgagcagcgtttgcggcgtattccacgcccgcaacatcacgccgctgccctcaaccaccccctgcaccgcaaatccggaggctaattcatcgacgcgagcacaaagctcgcgccagttgagttgctcgtcattaagacgtaaggcgatggtttctccccgcacttgccgccagtgacgccacggccagtcagagaagatcataacaaccgctccagtgcatcaacttccacgacaggcagcgtgctacccggccagcgacgtacctgctgcgcctgcatcagatccagcgtgtccagccctggaatggtgtccggcgttaaccaggcggcaatccgcgccagttgcgttaagcctaagctgctttcaatggaagaactgatcaccgccgtcagccccagcgcgtgcgccgcctgtacctgctcgcgtactttttccagactgcccgtgagcgtgggtttgataactaccgcgcgcacgccctcttcagccacaaaggcaaaatccggctcgcgcaggctttcatcccaggcaatggcaatgccggtttcacgggcaaacgctcggctatcatcgcgggttttgcacggctcttcgagaaacgcgatgcggtcgcgataatccgggttaacgtatttggcaaactgctgacctttcagcggtgtccaggcgcgatttgcgtcaagacgcaaatgcagatccggaattgcctccagcaacagattcaccaccatgccgtcgcgcaccgcttcgtacaatcccactttgaccttcgccactttctcgcctggcatatctgcaagtttgaggatcagatcgtccggatcgccattacacagcggtgccgcacggtagttggctgcttgcggcaacgtatctgtcagttctgccaatgcacagcttacgccaaaggccacggaaggcatctgcggtagctcgcaatcgcctgccagccagttatttacccaggcaagcagcacactttgcgcctcttcccaggtttcctgactgaagcccggcagtggggagatctccccccacccttcgcgctcgccttcacgcaggcaaacatacagcccgtcgcgggtttttaaccgcctgtcgcgcagaaccacccccgcgtccatggggatctgccagcggtatacctgcgcgctacgcattacggattccgtttgaatttgctgaagtcaggctgacgtttctggttgaaggcgttgcgaccttcctgaccttcttccgtcatgtagaacagcatggtggcgttgcccgccagctcctgcagccccgcctgcccgtcacagtcggcgttcagtgcagctttcaggcagcgcagcgccatcgggctgttttgcagcatttcgcggcaccaacggacggtttctttttccagatccgccagcggtaccacggtgttcacaaggcccatatccagcgcctgttttgcgtcgtactgacggcacaggaaccagatttcacgcgcttttttctgcccgacgatgcgagccatgtaggaagcgccccagccgccgtcgaaggaaccgactttcgggccagtctgaccgaagatggcattatctgccgcgatagtcaggtcgcacatcatgtgcagaacgtgaccgccgccgatggagtagccagccaccatcgcgacaaccggtttcggacaggtacggatctgacgctggaagtccagcacattcaggtgatgtacgccggaatcatctttatagccgccgtaatcaccacgcactttctggtcaccaccggagcagaacgctttatcgcctgcaccagtcagaatgatcacgccgatgttgtcgtcataacgcgcatctgccagcgcctggatcatctcttttaccgtcagaggacggaaggcattgcgcacctgcggacgattaatggtgatttttgcgataccgtcggtggatttttcataacgaatgtcctcgaaaccttcggagcagtcgtgccattcaaccggtgcgtaaagcattgcttcatcaggataaatcatattgtgtcctttagtcagaaacgcaagatctgcgccagacttgcgattacgccagcgggattttcccgatgcgcgttatgtccggcgcgaggaatgacatggcagtcggcagccagttccgccgccagggcgcggaatttgctgtcacgttcaccacataaataataaaacgcaaatgtgcgggcgctaaggttagcacgtaaatcaggctggacggcgagagaagtcgcctccagcatggcggcaagcgttgcgccattattgttgctgcgcagcgccaccagctcccggcgttgatcgtcattgagactggcaaaaacaggctgttgataccagtcggcaaataccgccgttaacggttctgtgagaaaacgctgcacccattggcgatcggaacgctgacgttccgcacgttgttcagcattttgcagccccggatgcccgccttcgacaataaccccacaaagccccgccagcccctggcaagccgccatcatcgccacccgtccaccaaggctgtaccccaccagccagaagtcaaggatgttgtaactaaccaaggttttacgcagtaagtcggtgacatcatcaaatccatcgacgctaatcgccgcgctaccaccgtgacctgggagatcaacatacaaccgactgtagtcggcaaacgcctcgcccacttcttgccattcgtggcaatcgccggaaaaaccgtgcaaaaacaccagccagggtaaacctggttttccgtgttttgcctgcgcgtgcaggatcataaatggcttacctgcgccagaagttgctggagcgtttgcgcaccatcggtgtcgttaaccaccatttcaatcaccgtggtggttggcgtgcgccaggcgtcggcaaatgccgtttcaagttcctgccagttttgcggacgatgatatttcagctcgaacatcgcggcggcgtgctcaaaatggacgttttgcggcatcagatagaaacgctcacgctcgctttgcggcgttggcaacaggctgaaaatttgcccgccgttgttgttcaccacaattaataccagcggcgcagaaacctgacgcaataacgccagcgcgttgagatcgtaaagtgcggagagatcgcccacaatcgccagcgtcggtttgccgcttgcccgctgaacgccggcggcggtgctaagcagcccgtcgataccgctggccccacggttgctgtacaccgggtaacctgccggaagttggctaagcgcatcaatcagacgtaccaccaggctgttaccaacaaacaattgcccctgttcaggcagatagtcgcagatgcgatgcgccagttgcgcttcgccaaacgcatcacggcgggcaataaccgcctgcattgcctgttccgccaggcgcgggatttcaacgcaccagggctggcgtttttctgccggatgcagctccagccagtcggcaatattggcaattaagcgacgtccgcgatggtgtgccggatcaagtcgcccttcaatgtcatcaacaatccagtactcttctggttcacagcttgcctgccattgcaggagccgtttccccgtcaggctgcttcccagttgcaccacaatttgcgcctgctgcagctcgctggtcgctttggcattgcctaaccaaagatcggcacacggcagcggctgcccggtttgactcagcacatcgccaatcagcggccagccaagagtttgcgcccacagggcaacttttttgccctcttccgcactcatgcgcccggcaaccaccacgccgcgcttttgtcgccagaagaaccagtcgcgctgtttttcactttccagacgaggcgcttcacgcagccacggtttgtcttcctgccaccagtcacccagacgctgttgccagctaagcccggtatcgtccatttcgccatacagcggttcagcaaacgggcagttgatatggactccccccgcatgaagcgtaccgagagcgtggtcgatggtagaaaccagccaacgtgcggggatatcctgggtcgggcgcggcaaactaatactgtgcgtggggtgagaggcgaacattcccggctggcgaattgcctgattcgcgccgcagtcaattagctccggcgggcgatcggcggttaagagaatcagtttttctccggttaacccggcttcaatcagtgccggatagagatttgccaccgccgtgccggaggtcacaatcaccgccaccggctgcttgctgactttcgccagccccagcgccagatgccccaacccacgctcatcgaaatgggtgtggtgaatgaatgcggaattctccgccgccgctaacgttaacggtgtagaacggctgcctggggcgatacagatgtgtctgacgccgtgacgcgttaatgcttccagaatgaccgccgcccagcgtcggttaaatgcgcttacactcatgagtttgtccggtatcaatattgcggctaagtataaggagctacaaaaatagattattgatatgaatcggtaatgatgcgactcattattattccatttgtaataaagtacgcagccctgccgctttgttgtcgatttcctgccactcttgctcggggtcggaaccacggacaatgcccgcgccagcatataatcgcacgacattgccgctaatttttgcactgcgcagggaaacgcagaattcgctttgttgtaaactgagatagcccgcagaaccggcgtaccattctcgggtgaacggttcgtgacgggcgataaactgtcgcgccagatcgcgcggtaagccagcaactgctgccgttggctgcaactgatgtaaacagatcacatcatccgctttgttgagactagtccagatacagcggcgaagatgctgcactttacgcagacgcagtacctgcggcggtaaaacatccagcgtctgggtatcggcctgtaatcgttgacagatatcttccaccaccagcatgttctcgcgctggtttttatcatccgccatcagccactctcctaactgctgcgcctgcttatcatcaggattatttgctactgttcccgccagcgcttcagtacgcagcgctttgtcacgccgccgccataaccgttccggactagagccaagaaaagcattttcgccatcaaaggccatgtaaaaatggtagcaattcagattcagtcgacgactggcagccatcatcgccgccgcgttgaccggacttgcgaaatgcaggtcagttgcccgagcgagcaccactttgtcgagctcaccttcggcgatggttttcgttgccagttcgattaattgcgtccagcccgttttgtccggccagtgttgttctcgcgtggtggttaaatgtaacccaggcaagggcttgatactcaccagtgtggcgataaattcttttgcctgaatcgcatcgtgctgaagggagctttcgctgaatagcgtcagccgcagcgtggctttaccgccacagcgtcgccattccaggcggggtaaaagtaaattgccctggctcgggtcaaaagcattcagcccccaaatgcgtaagtcggcgtgttccgggtgctggcgaagaaaacgttgtgcctggtccaagctcgtaaaacgggtaatcgcgcccaggacgacagcttcttcatcaccattacgttgttgccagtagaattgcgggtatgtttgctgactggccagccagctcaaggcatcaaaagcgtctttgagagggaaaggaatatcgataacccgaatgccgggtgtcgccggaatctcttggctcaaatggcgcagtagattttccagcgccgtagtaagactttgcacgcggacctctccctgttaaaagcctcacattatacggggtactacaaaaaaaatgcagtaccccggtgtagggaggttttaacggcgtgccagcaacagtcctagtaccagcccaacggccgcgcccacaccaattccttgccagggtttttcgtggacgtagtcatcagcacgataaactgcctgcttcgcccgatagtaataactgtcactagcctggctaacccgttttttcacatcatccagcgctttttctgcacgcgctttcagctcaacatatttctgatcggcgggatcgccagaggagcggagcacctcttccagtgtttcactaagcagcgtcaggtcgtcatcgatacgtgtatcaccaaactgattagacattctcgttctccatttgcgtaaaacctgtcactaactatagacaagggttgttgattacgcctgaattacctcgcgtgccatcccaatgtgtgggataccatcttcttcatagacctccgtcacagggataaaaccgaaactctggtagaagttttgcagatgcgcctgcgccccgaggtaaacaggcttatcaggccagtgatgcgtacatgtttcgagtgttttactcatcagctgctgccccactttttcgccacgcaacgcttcactgacaatcacccgacctataacgaccggctcaagatcatcatcacttttcagaatcctcgcatacgccaccagttcatcatttttccaaccgagaatatggcgattatcccccgtcaaatcatcaccatcgatatcctgataagggcaattctgctcgacaacaaacaccgcgcaacgcagttgtaataaggcataaagctgggaaacgcttaattcagagtgatgcagatcttgccattcaatcataatgctctccttttagatgtatgccttatactagccggaatattttttgaaacgtgatgaactcatggaattaatttttttaggtactagtgccggtgtgccaacccgcacgcgcaatgtcacggcaatattgcttaacctgcaacatccgacccagagcggactttggttgtttgactgcggtgaaggcacccagcatcagctactgcataccgcctttaaccctggaaaactggacaagatttttatcagtcaccttcatggcgatcatctttttggtttacccggcttgctgtgcagtcgttctatgagtggcattatccaacccttaacgatttatggtccgcaaggtatccgtgaatttgtggaaaccgcgctgcggattagcggcagttggaccgattatccgctggaaattgtcgaaattggcgctggcgaaattctcgatgatggcctgcgcaaagtaaccgcttatccgctggaacacccactggaatgttatggctatcgtattgaagaacatgataaaccgggtgcattaaatgcccaggcattaaaagctgctggcgtgccgcctggcccactgtttcaggaattaaaagcgggcaaaacaatcacgctggaagatggaaggcagattaacggcgcagattacttagctgctccagtgccaggtaaagcgctcgctattttcggcgataccggcccctgcgatgccgcacttgacctggctaaaggtgtcgatgtcatggtgcacgaagcgacgctggatataaccatggaagccaaagccaatagtcgcggccatagctctacacgccaggctgcgacactagcccgtgaggctggagtcggcaagctaatcattacccacgtcagcagccgctatgatgacaaaggttgtcagcacctgttacgtgaatgcaggagtattttcccggcgactgaactggcgaatgatttcaccgtgtttaacgtttaactctgcttattattaaaaacagggcgaaacttgccctgttatcgcaacccgcgctacatatatccacccacacaggcatattgagcgatttttgatatttattcatctccttacgcactatattcagagcaataagttgcctcttttcatcttgattcagcacaacctttgcaactaaaaggagcccatgatggttacagttgtcagcaattattgtcaattatctcaaacgcaactcagtcagacatttgcagaaaaatttactgtgaccgaggaattactgcagtctttaaaaaaaacagcgttatccggagatgaagaaagcattgagttactgcataatattgcgttaggttatgataaatttgggaaagaagctgaagatattctttaccatattgttagaaccccaacaaatgagaccctaagcattatccgacttatcaaaaatgcttgtttaaaattatataatctggcacatatcgcaaccaactcccccctcaaaagtcatgatagtgatgatctcctgttcaaaaaactattctcccctagcaaattaatgacaattatcggtgatgaaattcctcttatatctgaaaaacagagccttagtaaggtgcttttaaatgatgagaataatgaactgagtgatggtacaaacttctgggataaaaatcgtcaattaaccacagatgaaatagcttgctatcttcagaagatcgccgctaatgcaaaaaatactcaagtcaattatcctactggtctctacgtcccctactccaccagaactcacctggaagacgctctcaatgaaaatattaagagcgatccaagttggccgaatgaagtccagttattccccataaatactggcggacactggatattagttagcctacagaaaatagtaaataaaaaaaataataaactacaaataaaatgcgtcatattcaacagtttgcgtgcactaggctatgataaagaaaatagtcttaagcgtgtcattaatagttttaattctgaactcatgggagaaatgagcaataataatataaaagttcatttaaatgaaccagagataatatttttacatgccgatcttcagcaatacttaagccaaagttgcggtgcatttgtgtgcatggcagcccaggaagtgattgaacaaagggaaagcaattctgacagcgccccctatacgttattaaaaaaccatgctgacagatttaaaaaatatagtgcagaagagcagtacgaaattgattttcaacatcgactggcaaacagaaattgttatttagataaatatggcgatgcaaatatcaatcattattatagaaacttagaaataaaacacagtcaacccaaaaatagagcatccggcaaaagagtgagttaacatcattgttaattaattcgaccagtcagcaaatatgctgactggtcgaacatagtttgctaaacagtcatcactgactgatgtcagtcacaccatccgccagttcaatcaggcgaataaattccgccctgtaaccctgtggatcttccccttttgcctgctgagcccactgtttgatctgctgccaggaggtattgttcaggtattcagaaccgcgtaacttttgcccatatgcagctactgctgcgcgaaaacgcatatcttcagagggcgcgtttattgttggccccagcgggaattcaactaactgactttcttttccctgcgggtatttccagcgaatttttaaccaggccagttctttcgttttgtcgcttttcgctaatttgttatccggggcatagcgtaacttatcaatacttgctttttgcccgttcagcgttaattcgaataacaacgttatatgtttgcctgcgcctatatcccctgcatcaacgttgtcgttattaaaatgttccacccgaagttggcgcttttcataaccaatctgacggtattccgttacccacgcggggttaaactcaatttgcgctttgacatcttttgctacggtaatcaacatctgccgcatttcactattcaatactttctgcgcttcagagagggtatcaatgtagctgtagttgccgttaccaacatcggcaattcgcaccatcattgcctcgttgtaattgctattccccacgccaaacgtgctcagagtaacaccagactcccgctgttttttgaccatactttcaatgctttttggatcgtcaatgccaacgttaaagtcaccgtcagtggctaataaaatgcgattgatgccgcccttaataaaccccttcgtcgcctgctgataagccagttccagcccggcaccgccattggtactgccttcggcatccaggctatcaattgcggcattaatttccgccttatgactcccggagatagaaggcaatgcaatacgggagtcgccagcgtaggtcacgatggcaatgttatcctgctcacgaagttctttgaccaataatttcaagctagactggataagtggcaaacgttcatcagaaatcatactaccagaagtgtcgataagaaagaccagattagaagctggtaactcttcacttttgcgatctttcgccaggatatcaactttcagcaatgttcgctgttcattccatggtgcaggtgccaattcgtagcgcatagcgaaaggtattggcttagaggccggaatagattgtttgtctttgatatcccaatcagacgggaaataattgactatctcctccacccgcacagcgtctggcggaggtaacagcccttgattgaggaaacgccttacattcgcataactgccagtgtcaacgtcaagactaaacgtcgccaacggattttgcgctacctgcttaaccggattatcatcgaactgctggtagcgagcggttcctggatttgcgatatgtgtagcttttgctttagccgctcttgcaaatgttggcgcttcctgcaatcgcccctgtaaagcctgtttgtcactatattgttgcacttcttgctgggccaaggctttcgcggcggcggcgctttgctcagcctcttttattgcagcttgctgcgcggcaagcacttgctgctctgtgggagtactgggttgttgttgctgactttccttattctcaggttgcggcccacatccactcaaaatcaaactactcataagcaacatgattatatttttatttcgcatataaaatccttttaaataaactcaggcaccagacataaaatatactctttgtataatcctgctaatcttaataaaatacaatatcgaaacccatagcaaataatgattcaacaacgcaacccattaataatttgcatatgaaaaaaataatctttgcttttattatattatttgtgtttttactccctatgattattttttaccaaccctgggtcaatgcattaccgagtacgccccgacacgcaagtcctgagcaattagaaaaaacagttcgttatcttacacaaactgtgcatccacgtagtgccgacaatattgataatctgaataggtccgcagaatatataaaagaggtctttgtcagtagcggtgccagagttaccagccaggacgtccccattacgggtggcccctacaaaaacattgttgctgattatggtcctgccgatggaccgctgattattattggtgcgcattatgactctgccagcagttatgaaaacgatcaattgacctatacgccgggcgcggatgataacgccagcggtgtggcaggattactcgaactggcacgtttgttacatcagcaagtaccgaaaacaggcgtgcagctggtcgcctatgcgagcgaagaaccgcccttctttcgtagcgatgaaatggggagcgcggtgcatgcagctagccttgagcgtccagtgaaattaatgatagcactggagatgattggctattacgactctgcgcctggaagccagaattacccttacccggcaatgtcctggctttatcccgatcggggagactttattgccgtggtcggcagaatacaggatatcaacgccgttcgtcaggtaaaagcggcattgttgagttctcaggatttatctgtttattctatgaataccccagggtttattcccggtattgatttctctgaccacctgaattattggcaacacgatattcccgccataatgattactgacaccgctttttatcgtaataaacaataccacttgcccggtgataccgcagacagattgaattatcagaaaatggctcaggtagtggatggtgttataactttgttatacaacagtaaataataaaaatttctcgaggcgggtccagaaaaagcgacatgcacattttattttccctcatctgttttaagatgcgaaacatgaaattcaacggaggaaaaataaatgggaatgattggctattttgcagaaattgacagtgaaaagattaaccaactgcttgagtctactgaaaaacctttgatggataatatacatgacacgcttagtggattacgccgactggatattgataaacgctgggattttttacactttgggctgacaggcacctctgcttttgatcccgcgaagaatgatccgctgagtcgtgccgtgcttggtgaacacagcctcgaagatggcatagatggcttccttggattgacctggaatcaggagttagccgcgacaatcgaccgactggaaagtctggatcgaaatgaactgcgtaaacagttttccattaagcgactcaatgaaatggagatttatccgggagtgacctttagtgaagagttagaggggcaactctttgccagcatcatgcttgatatggaaaagctgattagcgcgtatcgacgtatgctgcgacaagggaatcatgcgctgacggttattgttgggtgatatagcttgatgcctgggggagaaagacccattagttaagatttacgccaggatcatcttgaaaaaatctttaaccatggtccggtttttatccccttgtataaatattactaaatgcttgcttagtcgcattgttaaatgcaataccgtatattcggtatgtaacagcgatatcctctgtgctggcaacgatctgtcatgcttgatgaaaacggaattgaacctgtcattaccaggtagataaaaagcctgttcaattttgggattattttttataactcgtgtctgttatggcgacacgggaaaacatcaatattgtccttcacaaattgcagtaatatagaatcaacctctcttgcaagttggtcacaatgtattataagcattttgaatatgtcatcctctgtaatctcgtgaaaattttcggccttgtcttttagctcatcatatcggattcttgcagtaaccattttttgggcgagttctaataaccccaaagcttgcaattgctggtgagtatgatcactttcaaaaaatatcccacactccattccttcccaaccaacatattcatgccattcataaaccagcataaatgtttgtaaaactggcggtaataattggatatctgcaaaaccaaaccaaaacttacgcttgagatcccactcatattcaatcgccaatgctatattgtttaaggcatctccggcatccttatttttacgcaaaatcaattccgtcagtgtatagcgttgttcatcaatacgccgaagagcttctgcaatatcatagtttgtagccaacaaaacattctctgcttcctgatgagtgacgtctgcttttgccgtcaatatattgatttggtcaatatgaaacaacttgatggcttcatcaacatcaccgccagtcctctctaacaaacgtctggcaacctggataccgacaggtacgttcttccgaagtttacgaatttcacttaaccattccatgtcaaacccctttaaatatttatgatattaaatataacaacgtctggataacgacccggcctgactgaatatctcacgttttcctgcttaacattcatgttatgatgctcttgaaactaataatacgtatggaattgtcactatttatctgctaatgaatagtaacaatgtcattcgtttgatgaatatattatttcagggaataattatgacacctttagaacgcattacccaacttgttaatatcaatggtgatgttaataatcctgatactcctcgtccattgttatctcttgaggatttttttattgacaataatatccatggtagtatatgttgcaatgtgattccagaacaatctccgcaagctatctatcaccattttctgaaaatacgtgagcgtaacaatgttagtgatgttttggtagaaattacgatgttcgatgacccagactggccctttagtgaaagtattttagttatcaccactgctagtccagaagaagttcagagctggtttgtagaagaaattgcccctgatgagtgctgggaaggatggagtgaagatacggagcatggatgggttgaagtccctgtgggtatgcatccggttacttgttggtgggattaaaacatttatataaacagataagcggatgtttacataaatttttatgtgaaggaacatgatgaaacttattcctcgcagtagtgatattagtcctggcattgatggaatttgcccggggccttttcctccgaacggatttaccgtacttacagatgcagcatatggtaacggagactgtttcggtttgtactggcctattggtcaggagcataaactacctatagtgtgcgaaacgtaccatgacgaatggcgaatcgtacctgccttttccagcattaagaagttcgaagaatggctggaagtgaatgatgatgatccccatgaaaatggcatcagcatcgaagatcaagactttgcagcaaatctcttccgtgttgctcggaaatgtcttagtacgggaaggcttgatgacgcactgccactgttacagcgagcaacagaacaattgcctgaagtcagcgaatattggttagcactggcaatccagtatcgccgatgtaaaaaaacagaagctgcagcacaggctgcgcttaatgcttatcttggcaattgggcatttggtgttcctgacaataaagtcattcatttgctgagtcaggccgcagatgtcccgaatttccaggatgatcctgtgattcagtgcattaaagaacaaggattagatcttagctttggaggaacaaaggaaaataataattaccccttgatgcagatgtgtgttgatacttattttgcgcagagaaaaccgcttcaggcattaaccctgttacataattatgcctggataatgtccagtgaaacgactgcatttcaggaacgctatgattttaatatcgatgaatggcgggcaaaattcaggcagttatgtttagagtattttggcgatagtcgtacacagttcacttaacgctctgcgtctatctactatcccttctttttcagaaaaaccgccgagcatgtcggcggctttctgacttacaaagtaacagattacatcagcggcattgccaaacgcacaatgctaatcagcggttgtggccatacacccagcaccagtaccaacagtgcagagatcagcacaacgataccgcccgcgctgtactgccagttacttggtgcatcgcgacccggttgttccggggcgtgaagatacaggctcaccgccacgcgcaggtagtagtagaggccgattgcgctaccgacaaccacggcacccaccagccaccacaagtgtgcctggacaccgaccgccagcacgtagaacttaccgataaagcccagcgtcatcgggataccggccagagacagcatcatcaccgtcatcactgccgcgaggatcggacgatgccagaacagaccgcggtaagagaacagggaatcagcatccgggccacgatacgggctggacatcaggctgaccacgccgaacgcgccgaggctgctgaacagataaccggccaggtaaacccctaccgcttccatgctcatctcgccggtttgcagcgcaatcagcgctaccagcagatagccgaggtgagagatagaactgtaaccgagcagacgtttgatattggtctggctcagcgccatcaggttaccgaagatgatggaggcaaaggcgataatcgccagcaccacgcgaatcgcttcgctgtcacccaccggtgcgtagaggaacagacgcatcaccacaccgaagatagcgattttgctcgccgtcgccaggaaagtggaaaccggcgcaggcgcgccctggtatacgtctggcgtccacaggtggaacggcaccagagagagtttgaagccgaggccaacaatcatcaggccgaaacctgccagcaacagcggctcgttgagcataccgtcgccaaggtttttacccaacgcgacaaagctcaggtcgccagactgcgcatacaccagcgccataccaaacagcaggaaagaagacgctgcggcagaaaggatggtgtatttgatactggcttccagactacgtttctggcggaaagcgtaaccgaccaggccaaacagcggcaaagagatcagttcgataccgaggaacagagacgccagatggttggcattcgccagcaggatcccgcccagcgcggcaattaacaccaacaggtagaactcatccttgttgtcgttatagccttcaagccacgggtaggcgaaagtacaggtggcgaggctcgccaacaataccagcccggtgtaaagcatggcgaaaccatcaacgcgcatcagcggcgtaacgtccatagcgcccgcctggccaacaaaccagagcgaaaccagcgccgcgttaagcccaataaccgagagcgtagcgttgaggaaatgattgcgtcgccacgcaatggagagcatcacaaccaccaccgtcaagccgacgatcagcaacggtagcagtgcgatcaggttttgtggagttattgtcatggcgatttacggccttgtagtagtaacggaattaacaaaccactgctggatattgccaatcgcggagtggctggtatccagaatcggctgcggatagaagcccagcagtaccagcagcaccaccagcaacaggatcataaacagctcacgcaggctcatccctggcagttcctggctggcaatctggcttttcgctttaccgaagtaagcgcgatgtaacatcgccaggctataaacagatgcaaagaccagcccaaaggtagagataacggtaatcaccggtacaacctggaagctgccgaacagaatcataaattcgccgacgaagttaccggtgccaggcatcccaagcgttgccaccgcaaagaacaggctcagtgctggcagccatttcatcttgctccacagaccgcccatcatgcgcatgtcgcgggtatggatacgttcataaagctgaccacaaagaataaacagacccgccgcgctcaaaccgtgcgcaatcatctggattaccgcgccctggtaggccaactggctgccggtgtagatagcaatcagcacgaagcccatgtgggaaacgctggtgtaggcgatcagacgtttgatatcggtctgggcgaaggccatccacgcaccgtagaagatgccgataacacccagccacatagcaattggcgcgaactctgcgctcgcgttcgggaacagcggcagggagaaacgcagcaaaccgtaagcggcagttttcagcaagatccccgcgaggtcaacggaaccggcggtcggagcctgggagtgcgcatccggcagccagccatgcagcggaaccaccggcattttgactgcgaaggcgatgaagaagcccagcattaacaggtattccacaccactggacattggcgtattcagcagctcttcatagttgaaggtccagacgccggtcgcattgtagtgaacaaaaaccagcgccaggatggcaatcaacatcaccaggccactcgcctgggtgtaaatgaagaacttggttgccgccgtgatacgcgttttaccgtcagaggctttatgcccccacagtgcgatcaggaagtacatcggcaccagcatcatttcccagaagaagaagaacaggaacatgtcgatggcaaggaacacgccgataacgccgcccaggatccacatcaggttgaggtggaagaagccctgatatttttcgatctctttccagctacatagtaccgccagcacaccgagcagaccggtcagcacgaccatcagcaggctcagcccgtcaatggcgagatgaatagagataccaaaacgcgggatccacggcatgtcgaattcagactgccactgcggaattccggcggattgcgtcagactataaccgccctgcaaccacagttgcaggctcagcgccagcgtcaatcccatggtgatcagcgcgatccagcgtggcaccttgacgccaaagcgttcggtctgccagcacaggaagccgccaataaagggaattaatattagccagggtagtaacatggcgatctttattccttgtaaaagtcccgtcaggaccggattttcaacgaattctcacgacagaaaattctcttcggactgggggtagtgtcggatgcaccgcgaaggcggcttatccgacctacgttcttatatgcccaggggcaatcccacaatccttaactcaacgcagtaccatcaacagtgccagcaccacgaccgcaccgatgctcatggatgccacataccagcgcagatagccgttctcacttaacagcagacctttacctgcaaagcgggaaaggacagccgggatgttcatcatactgttcagcggatcgcgtttcagcaaccaggcaatacccaggaacggcttgacgaacactttgtcatacagccagtcaaatccccaggcgttgtaccaccaggtgcccagcagacggcccggcgcactgttggcgatggaggtcaccagagtacgtttacccagccacagccaggctgccagcagaatgccgaccaccgcgaccacgccagaggtaatttccagggtcaacatgctgccgtgcgccagttccgtcgtttgcggaagcacgccctgcagcggcggtacaatcagtgcgccaacgaaggtggaaaggatcagcagcacaatcagcggcaggctgtgagttacccctttcacggcgtgagcgtgaatttgttcttttccgtggaagacgatgaaaatcatacggaaggtgtagaggctggtcataaacgcaccgaccagacctgccaccatcagattgatatgaccattcgccatcgcacccgcgaggatctcatccttactgaagaagcccgcagtgaccagcggtagtgcgctcagtgctgcgccgcccaccaggaagcagagataaaccagcggaatagatttacgcagaccgcccatcttgaagatgttctgttcgtgatggcaggccagaatgacggaaccggatgccaggaacagcagcgctttaaagaacgcgtgggtcatcaagtggaaaatcgccgcatcccatgcctgcacgccaagcgcgaggaacatgtagccaatctggctcatggtagagtaagcgagaacacgtttgatgtcggtctgtaccagcgcggcaaaaccggccagcagcagcgtaaccgccccgacaatacccaccagatgcagaacttccggcgtcatcaggaacaggccgtgggtacgggcgatcaggtagacacccgcggttaccatggttgcggcgtggatcagcgcggagacaggcgtcgggcccgccatcgcgtcggcaagccatgtctgcaacggcaactgcgcagatttaccgaccgcaccgcccagcagcatcagcgtcgcccacatcagcatgttattgccgtcagcaaagtgcgctggtgccagttccaccatttcgcggaagttcagggtgcccagttcgttgtaaagaatgaacagtgcgaaagcgaggaacacgtcacccacacgggtcacgacgaacgctttcattgccgctgcgccattcttcggatcggtgtaatagaacccgatcagcagataggagcacaggcccacgccttcccagccgaggtacatcagcagcaggttgtcggcaagcaccagaaccaccatgctggcgatgaacaggttggtgtaagcgaagaagcgagagtagccctcttcaccgcgcatataccaggaggcgtacatgtgaataaggaaacccacaccagtgaccacgctgagcatggtcaggctcaggccgtccagcaccaggttaaaaccgatgttaaagtcgcctacgctcatccacgtccacagcggctggctgtatgtctgctcgccgttagcgaagaaatcaacgccgataaaggcggttaccagcgccgccaggcccacagagcctacgccgacgatcgcgctgacgttttcagaccagcgcccacgggagaatgccagcaggacgaagccaatcaatggcaaaataatggttaaggcaagcatgttcatccgcgcatctcacttacactatcgatgttcaggttctggcgacgacggtgaagttgcagcagcagcgcaaggccgatactcgcttctgccgccgcgaggctgatggcgagaatgtacatcacctgaccgtcggtctggccccagtagcttccggcgaccacgaaggccagcgcggaggcgttaatcatgatttccagaccaatcaacataaacagcagattgcgacggataaccagaccggttaagccaagaacgaataagattgccgcgaggatcagtccatgttgtaaggggatcatgcgtgctcctccgtttttcttttcgcgctgtcgtctttacgattgctcagcacttcacccgcacgctcttcacgaccgacgtggaaggccacaaccagacctgcgagcagcagcatagaagccagttccaccgccagtacgtaaggcccgaacagcgtaatacccactgctttagcactgattggcgtaccgtcgataccctgatcgttaacaccgaggatggcgtaaacaatcaccaccagcatgatggcgctcaaaattgccggaccaatccacacctgcggtttcagccactggcgttcctgttcgatttcactaccgcccaggttgagcatcatcaccacgaacacgaacagcaccataatggcacccgcgtagacgataatttccagcgcaccggcgaagtaagcgcccagactgaagaacaccccggaaatcgccagcaggctaataatcaggtacagcagtgcgtgtaccggattggtatgggtgatcactcgcaaggtcgcaagtatggctatcaggccacagatataaaaagcgaactccattgcccctctccttacggtaacaggctcttgacgtcgataggcttggcttcgttctctgcttcgcccttatctttgccgtcgattgccatacctgccatccggtagaagttatattccgggtatttgcccggaccggagatcagcagatcctctttctcgtaaaccagatcctggcgcttgtattcccccatttcgaaatccggggttaactgaatcgccgtggtcggacaggcttcttcgcacagaccacagaaaatgcagcgactgaagttgatgcggaaaaattccgggtaccagcgaccgtctttggtttctgctttttgcaggctgatacagccgaccgggcaggctaccgcgcagaggttacaggctacgcaacgctcttcgccgtccgggtcgcgggtcagaacgatacgaccacgataacggggcggcagatagaccggctcttccgggtacattcgcgtttcgcgtttggcgaacgcgtgcaggccgatcatccagatactacgaacctgggtgccgaaacctactaacaattcttttaaggtcatggtcttattgccccttattgcgcctgccagagaatgacagccgccgttaccagcaagttgatcagcgtcagcggcaggcagattttccagccgaaggacattacctggtcataacgcggacgcggtaagctcgcacgaatcaaaatgaacatcatcataaagaacgcggttttcagcgcgaaccagatgaatggcggtaacaacgggccttgccagccaccgaagaacagcgtcaccatcaatgcagagatggtcacaatcccgatgtactcacccacgaagaacagaccgaacttcataccggaatattcaatgtggtaaccatccgccagttcctgctcggcttccggctggtcaaacgggtgacggtgacataccgccacgcccgcgatggcaaaggtaataaaaccaaagaattgcgggataacgttccacacatgcgcctggctgttgacgatgtcggtcatgttgaaactaccggcctgcgccaccacgcccatcaaggaaagcccgaggaacacttcgtagctcagggtctgcgcagaagcacgcatcgcacccagcaagctgtatttgttgttactactccagcccgcaaacagcaccgcgtaaaccgccagacctgccatcatcaggaagaacaaaatcccgatgttcaggtcggcaaccacccaacccggactgactggcacaatcgcaaaggccagcagcaggctggtaaaggcaatcatcggtgccagggtaaagatgacgcgatcgctgaatttcgggatccagtcttctttaaagaacattttgatcatgtccgcaaccagctggaggctaccgccccagccaacacggttaggtccgtaacggttctggaacagacccagcaggcgacgttcgccaaagctcatgaatgccccgcaggtgacaaccaccagcaggatcaccaccgctttgaggatggtcagcaggatctcaatcagttccggacttatccaactcattgttgtgcctccttgagatcctcaagatgcgcgccagccagcaccggagcaatgccggacatacccatcggcaagcccacctgccctgccgtcagtccttcggcgatttcaaccggcagcgtgaccgtgttgccatcgtaactaaaggagacgcgtgtacctgcgttcacacccaacttcgcggcatccgctgggttgagtttgatgtacggctgcggcatacggctctggaagaccggagcacgctgactcaattcatcgctgccaaacaggtggtaatacggcgcgatacgccatttcccgtcctgcggctggaagcgtgccggtacgctggtgaagtaatccagaccattttcgctggtttcaaacagacgcacgcccggatcgccaaagcgcagtttgccgcccacttcgtcctggaatttgttccacgcctgcggggagttccagcccggcgcccaggcaaacggcacttggctacggtgcgcagtcggctggttgttaccttccatgctgaaggtgaacatggtgtcaatatcctgcggctgacgcggctcatgaacgctgatattggcgcgcatggcggtacgaccgctgtaacggtgcggttcacgggccagtttctgcccacgaatacggaatgtcgcatccggcgcagcatctttgatacctgccagttccgggattttcgccacaacagcgtcaatcacatggtcgagctgcgtccagtccacttcacggctcagcagggtgctgtgcaggctgtgtaaccagcgccagctttccagcatgacagttttgctgtcgtaataagcaggatcgtaaacctggaagaaacgttgggcgcggccttcgttgttgatcaccgtaccgtcgctttcagcaaagctggcagcagaaagtaccagatgggcgttttccataatcgctgtgcgttgatgatcaaccaccatcaccagcggtgctttagccagcgcagcattcacgcggatagcagaagcgtgacgatgcagatcgttttccaacaccaccaccgcgtcggcgcgtccggtttccagttcggttaacgcttcttcaaggctaccgccacccataatgcccagccccatgctgttgacggaacgggcaatcatggtgataccgacgtcagcgccgcgacctttcagggctttcgcgacgttagccgccgcctgaatcacctctaagctaccggcgttcgtcccggagataatcaacggtttcttcgcacctgccagtgcctgcacgatgacgtcgattttgctttgcagctcaggttcgataccgtcaaccgctggtgcagagttatccagcgcatgggcgatggcaaaacctaaacgcgcctgatcttcaaccggtgcgcggtaagtccacgccgcgatatcatccagacgggtgtcatcaacgttggtaacaaacagcggatgcttcgcacgttgaccgatgttgaggattgccgcaatctgccagtcagccactttctgtgctgccgccatttcgcgcgctttacctttcacagcctgacgcactgccagcgcgacgcgcgcgccggtctgggtaacgtcttcgcccagcaccagtaccgcatcgtaagattcgatttcgcgcagagccggagtataaatgccgccttcacgcagcactttcagcgccagttgcagacgttcctgctcaccgtgagcgataccggtgtagaagttttcttcgcccaccagttcacgcagcgcaaagttgctttccacgctggcacgcggagaaccaataccgatcactttcttgctctgacgcagaatatctgccgcgccctgcattgcctgttcggcgttgagggtaatgaaatcatcgccacgacgctgtactggctgacgcggacgatccttcaggttgacgtaaccgtaaccgaaacgaccacggtcgcagaggaagtagtggtttaccgtaccgttgtaacggttttcgatacgacgcagttcgccgtaacgttcaccggggctgatgttacagccgatggaacattgctggcagatgctcggcgcaaactgcatatcccatttacggttgtaacgctcggagtgcgttttgtcggtaaatacgccggtcgggcaaatttcgaccaggttaccggaaaattcgctttccagcgtgccgtcttccgggcgaccgaagtagacgttgtcgtgcgcaccgtaaacgcccagatctgtaccgtcagcgtaatctttgtagtaacgcacacagcggtagcaggcgatgcagcggttcatttcgtgagagatgaatggccccaaatcctgattacggtgggtacgtttggtgaaacggtagcgacggaagctgtgtccggtcatcacaatcatatcctgaagatggcagttaccgccctcttcacataccggacagtcgtgcgggtggttggtcatcaaccactcgaccacgctttcacggaactgtttcgcttcttcgtcgtcaatggaaataaaggtgccatcggaagccggtgtcatacaggacatcaccaggcgaccacgcgtgtcttccgcgttttggtattgcttcaccgcacactggcggcaagcaccgacacttcccagcgccggatgccagcaaaagtaaggaatatcaaggcccagagacagacaagcttccagcaggttgtccgctccgttgacctcgtattctttgccgtctacatgaattgtagccattagcatgcttccagttttctcagtcagagactgagcgttaatcgaaattcggttaccagcgctctttcagcaggttcggctgaatcccattaatcaaatgggtattgctgaacggctgtttgattcccgcctcaaattcttcgcggaaatatttgatggcgctctgtaacggctccactgcaccaggtgcgtgggcacagaaagttttacccgggcctaagaatcgacacagttgctcaagtgtttcgatatcgcccggctgaccttcaccacgctccagcgcacgcagaattttcacgctccacggcagaccgtcgcggcacggcgtacaccagccgcaggactcacgggcgaaaaactcttccaggttacgcaccaggctcaccatgttgatctcatggtcaaccgccatcgccagcgccgtacccagacggctgcccgctttaccgatactttcgaattccatcggcagatcaaggtgcgcttcggtcaggaagtcagtccccgcgccgcctggctgccaggctttaaatttcagaccatcacgcataccaccggcgtaatcttcgaggatctcgcgtgcggtggtgccgaacggcagttcccacagtcccggatttttcacccgaccggagaagcccatcagcttggtgccagcatctttacttttgctgatgttctgataccactccacgccgttagcgaggatcgccggaacgttacacagggtttcgacgttgttgacacaggtcggtttaccccatgcgccggaggttgccgggaagggtggcttgctgcgtgggttagcacgacgtccttccagggagttgattaacgctgtttcttccccgcagatgtagcgccctgccccggtatggacgaacagttcgaaatcgaaacctgttcccataatgtttttgccaagcagacccgcttcggtggcttcggcaatggcacggcgcagattaactgccgcttcgatatattcgccacgcaggaagatgtagccacggtaagctttcagcgcaaacgcggagatgagcataccttccaccagcaggtgcggcagttgctccatcaacaggcggtctttataggtgcccggctccatttcatcggcattacacagcaggtaacggatgttcatggattcgtctttcggcatcaggctccatttcaggccagtgctgaagcccgcgccgccgcgccctttcagaccagcgtcttttacctgattaacgatttcgtccggagacagcccggtcagcgccttacgcgcgccttcgtaaccgtttttgctgcggtattcgtccagccacactggctgtttgtcatcgcgcagacgccaggtcagcggatgcgtttcgggagtacggataatgtttttcatttataccgctccagcagttcagggatcgcttccggggtcagatgcgcgtgagtgtcctcatcgatcatcatgtttggccctttatcacagttccccaggcagcaagttggcagcagcgtaaagcggccatcaaatgtcgtttgccctggtttgatgttcagctttttctcgagcgccgcctgaataccctgataaccgttgatatgacagaccacgctgtcacaataacggatcacatggcgaccaaccggctggcggaagatctgactgtagaacgttgccacaccttcgacgtcgcttgccggaatacccagcacatcggcgatcgcgtggatcgcaccatccggcacccagccacgctgcttctgaacgattttcagcgcttcaatggacgccgcacgcgggtcttcgtagtggtgcatctcgtgctcgatcgcttcacgctctgccgcactcagctcaaaagcctcggtttgtggttgttgattctcgtgcataattagcggtccacatcactcataacaaaatcgatactgcccagataaacaatcaggtcagacaccaggctgccgcggatcgccgccggaatttgctgcaaatgcgcaaagctcggggtacgaacacgggtgcggtaactcatggtgctgccgtcgctggtcaggtagtaactgttgatccctttggtcgcctcaatcatctggaaagattcattggcaggcatcaccggaccccagctcacttgcaggaagtgggtgatcagggtttcgatatgttgcagcgtgcgctctttcggcggcggcgtggtcagcgggtgatccgctttgaacgggccttccggcatgttgttgaggcactgctcaagaatgcgcagactctggcgcagctcttccactttaagcattacgcgggtgtagcagtcagaaacgccaccacccaccgggatttcaaagtcgaagttttcatagccagaataaggacgcgccttacgcacgtcgaagtcgatcccggtagcacgcaggcccgcgccagtggtgccccactccagcgcctctttcgcgccataggcggcaacgccctgggaacgacctttcagaatggtgttttgcagcgccgctttctcgtaagacgccagacgtttcggcatccagtcgaggaactcacgcagcaggcgatcccagccgcgcggcaggtcgtgcgctacgccgccaatacggaaccacgccgggtgcatacggaaaccagtgattgcttccaccagatcgtaaattttctgacgatcggtaaaggcgaagaacactggcgtcattgcgccgacgtcctgaataaaggtgctgatatacagcaggtgactgttgatgcggaacagttcggagagcataacgcgaatgacgttaacgcgatccggcacggtgatcccggccagtttctctaccgccagcacgtaaggcatttcgttaacgcagccgccgaggtattcgatacggtcagtatacggaatgtagctgtgccaggactggcgttcgcccattttctccgcaccacggtggtggtaaccgatgtctggtacgcagtcgacaatctcttcgccatcgagttgcaaaacgatacggaaagccccgtgcgcgctcgggtggttcggaccgaggttgaggaacatgaagtcctcgttttcggtgccgcgcttcatcccccactcttccggtttgaaggtcagggcttccatctccagatcctgtttggctttggtcagctcaaacgggctgaattcggtagcgcgcgccggataatctttacgcagcgggtgacctttccaggtttgcggcatcatgatgcgtcgcaggttcgggtgaccgtcgaaagtaatgccaaacagatcccaggtttcacgctcataccagttagcgttcgggaacagtttggtgaaggtcggtacgtgcaggtcgttttctgccagcgccaccttcagcatgatgtcgcggttacgatcgatagaaatcagatggtagaaaacggaaaaatccgcggcaggtaacccttcgcggtgtgtgcgcagacgttcgtccatgccgtgtaagtcaaacagcatgacgtaaggtttcggcagtttctttaagaaatcgccaacttccagtaattgttcacgcttgatccacacaacgggaaccccggtgcgagtcgcctgaacagtaaaggcatccggcccaaaacggttgcgcagttcgccaatcaccggatcatcaagatgatcgcgggtctgccaggcgggttcttgcgcggttaagtcggtcatattgttcaccattgcaaatggtccgtggtgactgtcggcgcagtaagcttcgcgaaatagatttaggaataagcgaagaaaaatccctttgccgacaggcgcaaattaaatctcgtcaggtgtacgcaggttagttacggcaatgcgttcaccgcgcttgcgttcgcgctcactttgcatattggcgcgataaacgccctgatcgccaaccacccaggagagcggacgacgttctttgccgatagattcctgcaacagcatcagtgcctgcatgtacgcttcaggacgcggcgggcagcccgggatatacacatcaaccgggatgaatttatcgacgccctgcacaacggaataaatatcgtacataccaccagagttggcacaggcacccatactgataacccattttggttccagcatctggtcatacagacgctgaataaccggtgccattttggtaaagcaggttcctgcaaccaccatcaggtcagcctgacgcgggctagcacgcaatacttctgcgccaaaacgcgccacgtcatgcaccgcggtaaagctagtcaccatctcaacgtaacagcaggaaagaccgaagttatacggccaaatactgtttttacgaccccagttaaccatgtcattgagcttgcccataaacacgtttttgttaacttcttgctccagagggtcggttacgatctcctgcttttgcagggggtaacggtcgttctcaccgttgggatctatgcgggtgagcgtataatccatcttaatgcctcgcggttagcgttgacgattagcgatactgttcgtttccgggttcatacgctcgcggcgactacgcgcgggcgtccagtccagcgcgccaatacgcaccagataaaccagacctgccagtaacacaaaaataaaaattgcagcttccacaaagcctacccagccgctttcgcggatagaggtactccatgcgaacagatacagcgcttcaacgtcgaagataacgaagaacatggccaccagataaaacttggcggacaggcgtaagcgggcggagccgacgctgtcgataccggattcaaacggcacgtttttgctcctcgcgcgtgcgcgaccgcctaaaaaccaaccgcctaccagcatcaggcaacacaggccaatggcaacgataagaaagatagcgaatgcccagtgatgagcgatgacttcagtggatgtactcatactcattgcttactcatcaaaagtagcgccagattcactgctcttcacggcagatggacgccacatcgattcatggggaggaataaaaaaaaccttacaatcactgtagaaattcttttatacagctaattgatgtggttttttactcctttctataaccttttgtcaactttaacaaaagtttcttcacattagtttacataatatcaacaccattagcatttaatgccctttcaccccagatccttgacgactccaggataattagatgttgttgaatcgtgtccgttgtgaagcaatggaaaaaatacgggtctattttgacaggaatttgtgtcgattcctccccccaaaagagagtattttcttgatctgtgacacgcttttgtcattccataacaaaaacgcagcaacaaatttacgtattttttaacatcattgtagcaggtgatttttttcaggcgattatttgtgcgttcgggacgtgaatctctggtggttgaaaaatgaacagttttgtacgttctgcactatgcgatgaaggatttttactaaaaaaaagccgctggggtttaaaacacccccagcggctcgttttttacactattgtctcaggaattatctatcgtccgtcgattactcgatatccctttcaatcaacaaactatcatccccttccggagcagacattgggctgtattgccacggattatggtagctctccatcgcctgatagatcacctgggccagctcattattactggacggatcatagcacagcaaatattcggtatcaggtagcggcggtaagccatctactccactcagcacacgcaggtccgggctcatcatctcaaccggccttgccgtcacgccaagaccggctttcactgccgcacgaacggccggaagcgtgctggcgacataagccagtcgccatggaatatctgctttattaagcgtcgccagcaccatatcgcgaaacgggctaggatcatccagcaatacaagagggatcggctcgcctttttgcaatatgtattccgctgcgcagtaccagtgtgttgggctggtacgcaggttcaatgccttaaacgcactaggacgatgggtggttaccatcaaatccacttcctgggattccagcatttctgccatataggcattacgtttaacgcggacatccagcgctaatttcggataaacgctactcacgcgatttaacaggaaaggtaagatcgtatcggcagattcatcactagcaccgatagttaatacgccctgaagattactgaacattaaactactgcaggcctcatcattaaaacgcaggattttcctggcgtaaccaagaagttgaatgccatgttcagttaacagtttgttgcgaccgtgacgagcgaacagttctttcccaacgagttgttccagacgctgcatttgctgacttacggcggactgagtacgacacacagcggcagctgcggcagcaaaagtgttcagatcggcaacagcaacaaatgttctcagcagatcgaggtcgaggttaattatcggacgatttgcacttatcatatattatcacttactggcggctcatactgagctggttaatgctgtgcacacacaaacaagcaattccatttgtaatgtgcctccctggcagtttcatccggaacccggacgaaagtaaaaatgcatatgagttgcactaaaaaagcgactcacattgttccgttataatgcctgaagtagatcacagaatatatcttcagggatcgcatatctattaagttactcactcttttctatttatgacatgcgcgtgtttgtataaatgtaaatgtgagtccttgttccactctcgtgcagcatcgctggtcatacgcgaacacgtaccaacagcaatggtgaggcggcatcaagagcagggatccgtcatttatccgagcattttaccccaaaaaccttttatttataagggtcattgcgaattatctgatgcaaagttatgttatgttaggcaaagtaatcttctattattaataagcacatcaaaacctttttgaatattaaataataattaattagcatcatcctcattcattaattccgcttaacaatagtttcacaccttgcccccattgcgacacctcggaaatcatcacgcagttaaactctccgtaatgaggaaatatcatcatcgcgtttcattagtgaattcttaaatgaggcattttcacacaattatcttacagataaaaaaaccagacttacaattaagaatcagaacaattcactatataacattgcatgtaaagcatatacacctcattattttgtcattattaagttattaacagcacaatcgagccttcccctctggcaaaatcttattctgcagaccttcaaaacaccgtcctgggggagtacattgttctaagctgacttccacggcagggagtggcgataacagcaaaaaaggtcaagattcatgtcccccattgaaaaatccagcaaattagagaatgtctgttatgacatccgtggtccggtgctgaaagaagcaaaacgcctggaagaagaaggtaacaaggtactgaaactgaacatcggcaacccagccccgttcggttttgacgcgccagatgaaatcctcgttgacgtgatacgcaacctgcctaccgctcaagggtattgcgattccaaaggtctttactccgcgcgtaaagccatcatgcagcactaccaggctcgtggcatgcgtgatgttaccgtggaagatatttacatcggcaatggtgtaagcgagcttatcgttcaggcaatgcaggcattgctgaacagcggggacgaaatgttggttcctgcaccagattacccactctggaccgcggcggttagcctttccagcggtaaagcggtgcattatctttgcgatgaatcctctgactggttcccggacctcgatgatattcgcgctaaaattacgcctcgtacgcgtgggatcgttattatcaacccaaataacccaaccggcgcggtatattccaaagagcttttaatggagattgtggagattgcacgtcagcataatctcattatcttcgccgatgaaatttatgacaaaattctctacgacgacgctgagcatcacagtattgcgccgctggcacctgacctgctgaccattacctttaacggactgagcaaaacgtaccgcgttgcaggcttccgtcaggggtggatggtgttgaacgggccgaaaaaacacgccaaaggctacatcgaaggtctggaaatgctggctagtatgcgcctgtgtgctaacgttcctgcgcaacacgccattcagaccgcgctaggtggttatcagagcatcagtgaatttattacccctggcggtcgtctttatgagcagcgtaaccgcgcgtgggaactgatcaacgatattccgggcgtttcctgcgtgaaacctcgtggtgcgctgtatatgttcccgaaaatcgacgccaaacgctttaacattcacgacgatcagaaaatggtgttggatttcctgttgcaggaaaaagttctgttggtgcaagggacggcattcaactggccgtggccggatcacttccgcattgtcacgctaccgcgtgtcgatgatatcgagctgtctttgagcaagttcgcgcgtttcctttctggttatcatcagctgtaatcttaatttcactgccggagattgcatccggcagcgttatcccgccacaatgacctgatgatgtcatcatacgtaaggtcactatgaaacagagccatttttttgcccatctctcccgcctgaaactcattaaccgctggccgctcatgcgcaacgtgcggacggaaaatgtgtccgaacacagtttgcaggtagcgatggtcgcccatgcgctggcagctatcaaaaatcgaaaatttggcggtaatgtcaacgccgaacgtatcgctttactggcgatgtaccacgatgccagtgaagtgctcaccggcgatctccctactccggtgaaatacttcaatagccaaatcgctcaggagtacaaggctattgaaaaaatcgctcagcaaaaactggtcgatatggttccggaagagctgcgggatatctttgcgccgttaattgacgagcatgcatatagcgatgaagaaaaaagcctggtgaaacaggcagatgcactgtgtgcatatctgaaatgtctggaagaactcgcggccggaaataatgaattcttgctggcaaaaacgcgactggaagcgacgcttgaagcgcgtcgcagccaggagatggactacttcatggaaatatttgttcccagcttccatcttagcctcgatgagattagccaggatagtccgctgtaagcagccggagtctgcgtcgcatcaggcaataagcgccggatgcgacatcaggctcttgtcaaaacggaaacagcatcgggatcatcaccacacaaaccgccatcacgataatggtgaacggtacccccaacttcacaaagtcactgaagctgtaatttcccggacctaaaaccagtgtgttaacaggactagaaaccggtgtcataaaggcggcggatgctgccatcgccacgaccatcgcgaatggataagggctcacccccatcgttttggcagcagccagcgcaatcggagccatcaacaccgccgtcgcggtattagagataaatagcccaataaccgcgctcaagacaaacaaacaccccagcatcatatgtggcccgtaaccaccgccaatgtccatcagccctttcaccgccagcgcgacacctcccgttttctgtaatgccacagcaaacggcatcatcccaacgatcaaaataatgctcggccagtgaatggatttataggcgctttcagcatctatacagcggaatttccccatcagcaggcaggcgatgatagcggcaacaggattaggaatttcatctgtcagcattaacgccaccattagcaccagacagaaaatggcatggggtgcctggctgtgcgcgggacttgcttcactcacctcttccggtaagttcagcgctacgaagtcgcggccctgtttggccagcataccgatcagtttccagttacccacaaccaggatgatatcgcccagcagcagaggctcatccgccaggctaccttccagcgccacgccattgcgctttagccccaccacattcagtccgtagcgggtacgaaaaccaatttcgcgcacgcttttaccaatcagttcactctcaggaattaaactaatctctgccatgcccacatcaagggcctggtcagaaaaatactcgccgcgcagtaccatcggctccagcaattgctcactacaaaattgccggagatcgacatcagccgcagacatatcaataagcaaaacgtcacgcgcgcgaaattcagaaaccccattaacgttcacgataacgcgacgaaaacgccgccagcgttcaacaccgatgacgttagcgccataacgctcacgtaatttgagatcatccagccgttgaccaatcattgggcttccggggcgaatagccagacgtcgcgcacgcccggtcagtcgatattcacggataagatcgcgaaaggttcgacgcgtccagccttcgcgctgcggggtctgggtatcccctttcagcatgaaacgcatcactaacatatacaaaatacccagcaccagcacgaccaggccaataggtgttacgctaaagaaactgaagccgtgatagccttcacgcagcaattcactgttgactaccaggttcggcggcgtcgccaccagcgtcatcatgccgctaatcagcccggcaaaacttaacggcatcatcagacgactcgggctcgtttgcatacgcatggcaacgcttaacaccacgggaataaagatagcgacaacgccggtactactcataaacgcgccaagccccgcgacggtcagcatcaacaaaaccaacattttgatttcactattgcccgcaactttgaccagccatgttcccattacggtggcaacaccggtacggaccaaaccatcgccaataataaacaaggcggcaatcaggacaacgttaggatcagaaaagccggaaaatacttctgggactgtcagcgttccgcttaatgcaaacgcgacaataacaaacaaagcgaccgcatccatacgcactctgcccgtcgcaaacaagacgatggcaacggccagtaaactaagaacccaaatcaattcaccgttcacaacttatccttgttaattgagggggatgacttgattctgccataaaaaagccccgacgagacggggctaaatcatgatcaggtgtttcactgaataataacatcgccatttggctgtttggtcacagtaatttgctccagactgtggaggaccaaatcgacctcattcaggcgcggggtatctgccggagcgttaaccgcaatgacatgacaacccgccgccaggccagaaagcacgccagcgggagcatcttccaccaccacacactcctgcggcgcaagccccagcagctgcgcgcctaacagatacgcatcaggttctggttttccgcgcttcactcgctcagcggttacaaacacctctggtgcgggaagcccagctattttatggcgcgctcgcgctaccggcatggagccagaagtcacaatggcccacggaatacctgctttattcaaatgactgagtaaggcgattgcccccggaagcgcggtaataccttcggtttccgtggcctcgatgtgctccagacgcgtaaactcggcggcaatatcagcctcggatttgcccgccataaaatggcgcagagaggtgatcgcctgtttaccgtgaatgaaagccagcacctcttccggcgctaacccatgacgtctggcccagttgctccacgcccgttctaccgcaggcagggaatccaccagcgttccatcaagatcaaacagaaaacctttgcaccgcacgcgggcctcctcaggcattgataatttgattaatttcgttggcgctcaaatggtactgacgcgggcaggcatgccacacattaagcatgcgctgatatttttcccacattggcgtctgggcgttaaaaccgtgagttccggcgtcaaaatgggtatagcgcccttccacattaaccataaagcggacataaccgaggtaacgtgcttcagtggcggcgtcaaagccgaggaaggtgacacgacgttcatcgatggattgctggtcctgcaaattagaccaggaaacatgcaacgcatgatacatctccataatgtcgatgatagtgcggcaggtttcttctttcagctcgccaaactcgcgatccaattcacgcatctgtaatccgtaaccacgctcaataattgtttgcaggcgacggtaacgttcagcatttgccggatcgagcatagtcatcatcttgtactgattagacaaaataagacgttgcgcgttggtcatttccattgttgactcctgtatcactctactacggtgaaaaaaaagaaggctgagtatgccttcttttatatgcgtaatcaggggtcaattacaaatcatcaaggaaagttttatccagttgtttgaaggcgcgcttaagcgtgtcagctaatgcctggtaatcaggcttgccttcaacgggtgccaacacctgtccagactcctgcaatttaccgcgaacttcataaaaccagttaaggattgcagggggtaatggcgtgacagaacgcttgcccagccaccacaatccctgcatgggtaaacttaaggcgaacagggcagtggcaactgccggcccaagctgaccgcccagggcaatctgccagcagagagtaaatacggcgatcggcggcataaaacggatcgcataacgcgtcatcttgataacgcgattttcgacaaagaccggggcaaggcgtttttccagcggccacgtcttactgtaatgctgtccccggcgaaacaagctaaaaaaattaacagaacgattatccggcgtactcatgcttcacctcaacttcacatataaagattcaaaaatttgtgcaaattcacaactcagcgggacaacgttcaaaacattttgtcttccatacccactatcaggtatcctttagcagcctgaaggcctaagtagtacatattcattgagtcgtcaaattcatatacattatgccattggctgaaaattacgcaaaatggcatagactcaagatatttcttccatcatgcaaaaaaaatttgcagtgcatgatgttaatcataaatgtcggtgtcatcatgcgctacgctctatggctccctgacgtttttttagccacgtatcaattataggtacttccatgagcagtaagttagtactggttctgaactgcggtagttctagtctgaaatttgccatcatcgatgcagtaaatggtgaagagtacctttctggtttagccgaatgtttccacctgcccgaagcacgtatcaaatggaaaatggacggcaataaacaggaagcggctttaggtgcaggcgccgctcacagcgaagcgctcaactttatcgttaatactattctggcacaaaaaccagaactgtctgcgcagctgactgctatcggtcaccgtatcgtacacggcggcgaaaagtataccagctccgtagtgatcgatgagtctgttattcagggtatcaaagatgcagcttcttttgcaccgctgcacaacccggctcacctgatcggtatcgaagaagctctgaaatctttcccacagctgaaagacaaaaacgttgctgtatttgacaccgcgttccaccagactatgccggaagagtcttacctctacgccctgccttacaacctgtacaaagagcacggcatccgtcgttacggcgcgcacggcaccagccacttctatgtaacccaggaagcggcaaaaatgctgaacaaaccggtagaagaactgaacatcatcacctgccacctgggcaacggtggttccgtttctgctatccgcaacggtaaatgcgttgacacctctatgggcctgaccccgctggaaggtctggtcatgggtacccgttctggtgatatcgatccggcgatcatcttccacctgcacgacaccctgggcatgagcgttgacgcaatcaacaaactgctgaccaaagagtctggcctgctgggtctgaccgaagtgaccagcgactgccgctatgttgaagacaactacgcgacgaaagaagacgcgaagcgcgcaatggacgtttactgccaccgcctggcgaaatacatcggtgcctacactgcgctgatggatggtcgtctggacgctgttgtattcactggtggtatcggtgaaaatgccgcaatggttcgtgaactgtctctgggcaaactgggcgtgctgggctttgaagttgatcatgaacgcaacctggctgcacgtttcggcaaatctggtttcatcaacaaagaaggtacccgtcctgcggtggttatcccaaccaacgaagaactggttatcgcgcaagacgcgagccgcctgactgcctgatttcacaccgccagctcagctggcggtgctgttttgtaacccgccaaatcggcggtaacgaaagaggataaaccgtgtcccgtattattatgctgatccctaccggaaccagcgtcggtctgaccagcgtcagccttggcgtgatccgtgcaatggaacgcaaaggcgttcgtctgagcgttttcaaacctatcgctcagccgcgtaccggtggcgatgcgcccgatcagactacgactatcgtgcgtgcgaactcttccaccacgacggccgctgaaccgctgaaaatgagctacgttgaaggtctgctttccagcaatcagaaagatgtgctgatggaagagatcgtcgcaaactaccacgctaacaccaaagacgctgaagtcgttctggttgaaggtctggtcccgacacgtaagcaccagtttgcccagtctctgaactacgaaatcgctaaaacgctgaatgcggaaatcgtcttcgttatgtctcagggcactgacaccccggaacagctgaaagagcgtatcgaactgacccgcaacagcttcggcggtgccaaaaacaccaacatcaccggcgttatcgttaacaaactgaacgcaccggttgatgaacagggtcgtactcgcccggatctgtccgagattttcgacgactcttccaaagctaaagtaaacaatgttgatccggcgaagctgcaagaatccagcccgctgccggttctcggcgctgtgccgtggagctttgacctgatcgcgactcgtgcgatcgatatggctcgccacctgaatgcgaccatcatcaacgaaggcgacatcaatactcgccgcgttaaatccgtcactttctgcgcacgcagcattccgcacatgctggagcacttccgtgccggttctctgctggtgacttccgcagaccgtcctgacgtgctggtggccgcttgcctggcagccatgaacggcgtagaaatcggtgccctgctgctgactggcggttacgaaatggacgcgcgcatttctaaactgtgcgaacgtgctttcgctaccggcctgccggtatttatggtgaacaccaacacctggcagacctctctgagcctgcagagcttcaacctggaagttccggttgacgatcacgaacgtatcgagaaagttcaggaatacgttgctaactacatcaacgctgactggatcgaatctctgactgccacttctgagcgcagccgtcgtctgtctccgcctgcgttccgttatcagctgactgaacttgcgcgcaaagcgggcaaacgtatcgtactgccggaaggtgacgaaccgcgtaccgttaaagcagccgctatctgtgctgaacgtggtatcgcaacttgcgtactgctgggtaatccggcagagatcaaccgtgttgcagcgtctcagggtgtagaactgggtgcagggattgaaatcgttgatccagaagtggttcgcgaaagctatgttggtcgtctggtcgaactgcgtaagaacaaaggcatgaccgaaaccgttgcccgcgaacagctggaagacaacgtggtgctcggtacgctgatgctggaacaggatgaagttgatggtctggtttccggtgctgttcacactaccgcaaacaccatccgtccgccgctgcagctgatcaaaactgcaccgggcagctccctggtatcttccgtgttcttcatgctgctgccggaacaggtttacgtttacggtgactgtgcgatcaacccggatccgaccgctgaacagctggcagaaatcgcgattcagtccgctgattccgctgcggccttcggtatcgaaccgcgcgttgctatgctctcctactccaccggtacttctggtgcaggtagcgacgtagaaaaagttcgcgaagcaactcgtctggcgcaggaaaaacgtcctgacctgatgatcgacggtccgctgcagtacgacgctgcggtaatggctgacgttgcgaaatccaaagcgccgaactctccggttgcaggtcgcgctaccgtgttcatcttcccggatctgaacaccggtaacaccacctacaaagcggtacagcgttctgccgacctgatctccatcgggccgatgctgcagggtatgcgcaagccggttaacgacctgtcccgtggcgcactggttgacgatatcgtctacaccatcgcgctgactgcgattcagtctgcacagcagcagtaatctcgtcatcatccgcagctttgcgctgcggatatctgaaccggaaataatcactatttccggttttttattctcttaatttgcattaatcctttctgattatcttgcttaactgcgctgcatcaatgaattgcgccatcccactttgcatacttaccactttgttttgtgcaagggaatatttgcgctatgtccgcaatcactgaatccaaaccaacaagaagatgggcaatgcccgatacgttggtgattatcttttttgttgctattttaaccagccttgccacctgggtagttccggtggggatgtttgacagtcaggaagtgcagtatcaggttgatggtcaaacaaaaacacgcaaagtcgtagatccacacagttttcgcattctgactaacgaagcaggcgaacctgagtatcaccgcgtacagctgttcacgacgggcgatgaacgcccgggcctgatgaacttcccgtttgaaggattaaccagtggaagcaaatacgggacagccgttggcatcatcatgtttatgctggtgattggcggcgcgtttggcattgtgatgcgtacaggaaccattgataacggtatcctggcgcttattcgccatacccgcgggaatgaaattctctttattcctgcgctgtttattctgtttagtcttggcggcgcggtatttggtatgggagaagaggccgtcgcctttgccattatcatcgcaccgctaatggtccggctgggctatgacagtattaccaccgtcctggtgacctatattgccacgcaaatcggttttgccagtagctggatgaacccgttttgtgtggtcgttgctcaggggattgccggcgttccggtgctttctggctccgggttgcgtatcgtggtgtgggttatcgccactctgattggcctgatctttaccatggtgtacgccagtcgagtgaaaaagaatcctcttctgagtcgcgtgcatgagtccgaccgcttctttcgtgaaaagcaggctgatgttgaacaa
